(19) United States
(12) Patent Application Publication
(10) Pub. No.: US 2025/0243259 A1
(43) Pub. Date: Jul. 31, 2025

(54) CHIMERIC ANTIGEN RECEPTORS AND METHODS OF USE THEREOF

(71) Applicant: Dana-Farber Cancer Institute, Inc., Boston, MA (US)

(72) Inventor: Wayne A. Marasco, Wellesley, MA (US)

(21) Appl. No.: 18/970,194

(22) Filed: Dec. 5, 2024

Related U.S. Application Data
(62) Division of application No. 16/986,913, filed on Aug. 6, 2020, now Pat. No. 12,195,514.
Application No. 16/986,913 is a continuation of application No. 15/537,779, filed on Jun. 19, 2017, now abandoned.
(60) Provisional application No. 62/094,625, filed on Dec. 19, 2014.
(60) Provisional application No. 62/252,083, filed on Nov. 6, 2015.

(51) Int. Cl. C07K 14/725; C07K 14/705; C07K 14/735; C07K 19/00

(52) U.S. Cl. CPC C07K 14/7051; C07K 14/705; C07K 14/70521; C07K 14/70535; C07K 14/70578; C07K 19/00; C07K 2319/02; C07K 2319/03

(57) ABSTRACT

The present invention provides chimeric antigen receptors, cells expressing same and methods of using same for treatment various disorders such as cancer.

### RELATED APPLICATIONS

[0001] This application is a division of U.S. patent application Ser. No. 16/986,913, filed on Aug. 6, 2020 and later issued as U.S. Pat. No. 12,195,514, which is a continuation of U.S. patent application Ser. No. 15/537,779, filed on Jun. 19, 2017, which is a National State Entry of PCT application number PCT/US2015/067255, filed on Dec. 21, 2015, which claims priority to, and the benefit of U.S. Provisional Application No. 62/094,625 filed on Dec. 19, 2014, and U.S. Provisional Application No. 62/252,083 filed on Nov. 6, 2015, the contents of each of which are hereby incorporated in their entireties.

### GOVERNMENT INTEREST

[0002] This invention was made with government support under Grant No. R21 DK072282 awarded by the National Institutes of Health. The government has certain rights in the invention.

### INCORPORATION-BY-REFERENCE OF SEQUENCE LISTING

[0003] The contents of the XML file named 5031461-000035-US5_SL.xml, which was created on Feb. 10, 2025 and is 1,569,810 bytes in size, are hereby incorporated by reference in their entirety.

### FIELD OF THE INVENTION

[0004] The present invention relates generally to chimeric antigen receptor cells for and methods of using same for treatment cancer and other disorders.

### BACKGROUND OF THE INVENTION

[0005] T lymphocytes recognize specific antigens through interaction of the T cell receptor (TCR) with short peptides presented by major histocompatibility complex (MHC) class I or II molecules. For initial activation and clonal expansion, naive T cells are dependent on professional antigen-presenting cells (APCs) that provide additional co-stimulatory signals. TCR activation in the absence of co-stimulation can result in unresponsiveness and clonal anergy. To bypass immunization, different approaches for the derivation of cytotoxic effector cells with grafted recognition specificity have been developed. Chimeric antigen receptors (CARs) have been constructed that consist of binding domains derived from natural ligands or antibodies specific for cell-surface antigens, genetically fused to effector molecules such as the TCR alpha and beta chains, or components of the TCR-associated CD3 complex. Upon antigen binding, such chimeric antigen receptors link to endogenous signaling pathways in the effector cell and generate activating signals similar to those initiated by the TCR complex. Since the first reports on chimeric antigen receptors, this concept has steadily been refined and the molecular design of chimeric receptors has been optimized. Aided by advances in recombinant antibody technology, chimeric antigen receptors targeted to a wide variety of antigens on the surface of cancer cells and of cells infected by human immunodeficiency virus (HIV) have been generated.

### SUMMARY OF THE INVENTION

[0006] In various aspects the invention provides a chimeric antigen receptor (CAR) having an intracellular signaling domain, a transmembrane domain and an extracellular domain.

[0007] In some aspects the transmembrane domain further includes a stalk region positioned between the extracellular domain and the transmembrane domain. The transmembrane domain includes CD28. In another aspect the CAR further includes one or more additional costimulatory molecules positioned between the transmembrane domain and the intracellular signaling domain. The costimulatory molecules is CD28, 4-1BB, ICOS, or OX40. The intracellular signaling domain is for example a CD3 zeta chain. The extracellular domain is an antibody such as a Fab or a scFV. Preferably the antibody is specific for BCMA, CA-9, CD138, CCR4, or the influenza virus.

[0008] Also included in the invention are nucleic acids encoding the CAR of the invention further including a nucleic acid encoding a polypeptide positioned after the intracellular signaling domain. The polypeptide is an antibody such as scFV. Preferably, the antibody is specific for CCR4, PD-1, PDL-1, PD-L2, CXCR4, or GITR. Also provided by the invention are vector including the nucleic acid according to the invention and cells including the vectors.

[0009] In yet a further aspect the invention provides a genetically engineered cell which express and bear on the cell surface membrane the chimeric antigen receptor of the invention. The cell is a T-cell or an NK cell. The T cell is CD4⁺ or CD8⁺. The cell is a mixed population of CD4⁺ and CD8 cells⁺. The cell is further engineered to express and secrete a polypeptide such as for example an antibody.

[0010] Unless otherwise defined, all technical and scientific terms used herein have the same meaning as commonly understood by one of ordinary skill in the art to which this invention pertains. Although methods and materials similar or equivalent to those described herein can be used in the practice of the present invention, suitable methods and materials are described below. All publications, patent applications, patents, and other references mentioned herein are expressly incorporated by reference in their entirety. In cases of conflict, the present specification, including definitions, will control. In addition, the materials, methods, and examples described herein are illustrative only and are not intended to be limiting.

[0011] Other features and advantages of the invention will be apparent from and encompassed by the following detailed description and claims.

### BRIEF DESCRIPTION OF THE DRAWINGS

[0012] FIG. 1A-FIG. 1C. ADCC of CAIX-specific Abs. 1 μg/ml CAIX-specific scFv-Fc minibodies were added to the target tumor cells in the presence of human PBMC (E:T 25:1). Similar results were obtained in 2 experiments. Irrelevant anti-SARS scFv-Fc (11A) and anti-CCR4 scFv-Fc (48) minibodies were used as negative controls. FIG. 1. A, CAIX+ sk-rc-09 cells; FIG. 1B, CAIX+ sk-rc-52 cells; FIG. 1C, CAIX− sk-rc-59 cells.

[0013] FIG. 2A-FIG. 2C. Construction and expression of CAIX-specific CARs. FIG. 2A. Construction: The 1^{st} generation CAR, scFv-CD8-TCR (CD8 CAR), is composed of a specific anti-CAIX scFv that is coupled to truncated human CD8 extracellular domain, hinge (H), transmembrane (TM) and intracellular regions, then to the signaling domain of human TCR. The 2^{nd} generation CAR, scFv-CD28-TCR (CD28 CAR), contains anti-CAIX scFv fused with human CD28 extracellular, TM and intracellular signaling domain to TCR. Both anti-CAIX CARs were cloned into a bicistronic self-inactivating (SIN) lentiviral vector with expression driven by an internal eF1-promoter. The CAR control construct contains an irrelevant anti-HIV CCR5 specific A8 scFv substitution. FIG. 2B. FACS analysis: Reporter gene ZsGreen was used to quantitate primary T cell transduction efficiency by the lentiviral CAR constructs. In addition, anti-CAIX scFv CARs were stained with CAIX-Fc fusion protein and C9-tag (TETSQVAPA (SEQ ID NO: 1678)) was stained with 1D4 antibody. Untransduced activated T-cells, LAK only were served as unstained cell control (i) or stained with 2^{nd} antibody (ii. PE-anti-human IgG and iii. APC-anti-mouse IgG) were used as staining controls. FIG. 2C. Western blot: Molecular sizes of monomer/dimer structures of anti-CAIX (clone G36) CD28 and anti-CCR5 (clone A8) CD28 CARs, as well as endogenous TCR chain of untransduced T cells were indicated.

[0014] FIG. 3A-FIG. 3C. Effector functions of CAIX-specific CARTs. FIG. 3A. Cytokine secretion. Anti-CAIX CART, irrelevant CART or activated control T cells (LAK) were cocultivated overnight with kidney cancer cell lines sk-rc-52 (CAIX+) and sk-rc-59 (CAIX−) for cytokine production. One representative out of 2-3 results is shown. FIG. 3B. ELISPOT. G36 CART or control A8 CART cells were added to tumor cells overnight. IFN- or granzyme B secreting T cells detected by ELISPOT. Similar results were obtained in 2-3 experiments. FIG. 3C. Specific anti-tumor cytotoxicity of CAIX-specific CART cells, control A8 CART cells or LAK cells were incubated in a 4-hour cytotoxicity assay at different amounts of target tumor cell at the ratios as indicated. One out of two experiments is shown. Clone 4-1 is a in vivo passaged subclone of sk-rc-52.

[0015] FIG. 4.A, FIG. 4B and FIG. 4C. Clonal expansion of CART cells after tumor contact. FIG. 4A. Proliferation. CAR-transduced T cells or untransduced T cells (LAK) were plated with irradiated tumor cells (CAIX+ sk-rc-52 & CAIX− sk-rc-59) weekly at three different ratios of tumor to T cells as indicated. Number of T cells was counted every 3-4 days in triplicate from two separate wells. Similar results were obtained in two experiments. FIG. 4B. Clonal enrichment. In tumor stimulation experiments, cultures from CART- and LAK cells were assayed on one week and two weeks by flow cytometry for expression of CART and T-cell subset. One representative of two results is shown.

[0016] FIG. 5. Regression of established human RCC xenografts by CART cells. Athymic null mice were inoculated subcutaneously with 7.5×10⁶ sk-rc-52 and 5×10⁶ sk-rc-59 RCC tumor cells at left and right flank respectively. After 6 days of tumor implantation, mice were injected i.v. with 50×10⁶ G36 CD28 CART cells, A8 CD28 CART cells (≥20% CAR+), LAK, or PBS alone. High dose of IL-2 (1×10⁵ U/ml) was injected every 2-3 days. Tumor size was measured by caliper every 2-3 days. Experiment 1, n=7 & Experiment 2, n=8. Tumor size of these two experiments was shown separately. +,p<0.05; *,p<0.01; **,p<0.001 in groups of G36 Tandem treated mice versus control no T cell treated mice in these two trials. Other statistic calculations are reported in the text.

[0017] FIG. 6A-FIG. 6C. In vivo anti-tumor activity of CAR+ T-cells. FIG. 6A. Expression of ZsGreen by CART cells is shown in upper panel. CART cells were pre-stained with Far Red dye, cytospun and examined by fluorescent microscopy (lower panel). FIG. 6B. In situ staining of G36 CD28 CART cells in regressing tumor. CART-cells were i.v. injected into RCC established mice and tumor tissue was collected on day 1-3. Confocal microscopy was used to measure apoptosis of tumor cells by TUNNEL assay with PE-Cy5 dye (shown as red). Transduced T cells were shown by ZsGreen. Nuclei were counterstained with DPAI. Two representative slides were shown to indicate the apoptosis of tumor cells at the edge of tumor (upper panel) and inside the tumor bed (middle panel), respectively. The magnified image (lower panel) demonstrates CART cells interacted with multiple tumors while a few surrounding tumor cells were dying. FIG. 6C. Granzyme B+ T cells and tumor necrosis. After the treatment with CART cells, the regressing CAIX+ sk-rc-52 tumors were stained by granzyme B antibody (brown) and H&E. The higher magnification view (middle and lower panels of sections a and b in upper panel) shows the locations of granzyme B+ T cells (shown by arrows) and the corresponding H&E slide shows the tumor necrosis (shown by n). Granzyme B+ T cells are distributed at the edge of tumor (middle panel) and inside the tumor (lower panel).

[0018] FIG. 7. CAIX− sk-rc-52 tumors treated with control LAK cells showed negative granzyme B staining (left) (upper panel) and the corresponding histology was shown in H&E (right).

[0019] FIG. 8. Low background staining of granzyme B in CAIX− sk-rc-59 tumors treated with G36 CD28z CART cells

[0020] FIG. 9. Low background staining of granzyme B in CAIX− sk-rc-59 tumors treated with LAK cells.

[0021] FIG. 10. Positive control of granzyme B staining was performed on sk-rc-52 tumors which was local injected with G36 CD28z CART cells (left) and tumor morphology was shown in H&E (right).

[0022] FIG. 11. Expression of αCAIX CAR and αPD-L1 scFv-Fc transiently transfected 293T cells. 10⁶ of 293T cells were transfected with or without lentiviral pHAGE-EF1αG36-C9tag-CD28-CD3zeta-IRES-anti-PDL1 scFv-Fc (IgG4)-WPRE or the control pHAGE-EF1α-A716-C9tag-CD28-CD3zeta-IRES-ZsGreen-WPRE plasmids. Cells and supernatant were harvested at 24 and 48 hours post transfection. Left, purified CAIX(ECD)-Fc-Biotin and Streptavidin-APC were used for cell staining and flow cytometry analysis. Right, total human IgG in supernatant was quantitated with human IgG quantification kit.

[0023] FIG. 12 (A) Total PBMCs from 4 donors were stimulated with 50 ng/ml SEB and treated with 10 μg/ml anti-PDL1 (#42) sIgG4 or anti-influenza sIgG4. Restoration of IFNγ production (upper) or TNFa production (lower) was measured. (B) Parental anti-CCR4 antibody, c1567IgG, inhibited chemotaxis of Tregs to CCL22. (C) CD4⁺CD25⁻ T cells were CFSE-labeled, incubated with Tregs at 10:1 ratio, and then stimulated with anti-CCR4 mAb and control mAb in the presence of anti-CD3/28 co-stimulation. After 3 and 7 days cells were harvested and analyzed by flow cytometry. The percentage of cells was calculated among the fluorescence positive CD4⁺CD25⁻ T and counting beads. The percent proliferation was normalized to CD4⁺CD25⁻ T effector cells at Day 0. The data shown were calculated from two independent experiments. Bars represent mean±S.D. (D) IFNγ ELISpot analysis of mAb2-3 and control antibody treated CD4⁺CD25⁻ Teff cells. Data represents the quantification from three separate experiments using three individual donor bloods. (E) Left, CFSE-labeled Teffs (5×10⁴) and unlabeled Tregs (5×10³) were co-incubated with 20 μg/ml PHA in 96-well plates for 5 days. The CFSE-labeled Teffs were harvested and CFSE intensity was analyzed by flow cytometry. The proliferation of Teffs were only observed when the coculture incubated with anti-GITR mAb. Right, IFNγ production in the same cultures was further measured by MSD. CFSE-labeled Teffs (5×10⁴) and unlabeled Tregs (5×10³) were co-incubated with 20 μg/ml PHA in 96-well plates for 5 days. The CFSE-labeled Teffs were harvested and CFSE intensity was analyzed by flow cytometry. Teffs were proliferated after 5-day incubation with PHA, but not in the Teff/Treg coculture. Left, IFNγ production in the same cultures was measured by MSD.

[0024] FIG. 13 is an illustration showing different CART configurations according to the invention.

[0025] FIG. 14 is an illustration showing different armed CART configurations according to the invention.

[0026] FIG. 15 is a further illustration showing different armed CART configurations according to the invention.

[0027] FIG. 16 is a series of illustrations and graphs indicating chimeric antigen receptors (CAR) constructs for CD8+ T cell transduction. (A) Schematic representation of second generation pHAGE lentiviral vectors containing CD28 as a co-stimulatory domain. The anti-carbonic anhydrase IX (CAIX) or the Anti-B-cell maturation antigen (BCMA) scFv (as a negative control) were inserted after the eIFα promoter, in order to express the CAR binding domain. The second cassette, after the Internal Ribosome Entry Site (IRES) sequence, is responsible by coding the soluble Anti-PD-L1 IgG1 or IgG4 isotypes or the Anti-Severe Acute respiratory syndrome (SARS) coronavirus IgG1. To produce the lentiviruses, the pHAGE vectors were transfected together with the packaging plasmids (Gag, Rev, Tat and VSVG) into 293T LentiX cells using Polyethyleneimine. The viruses were harvested two days after transfection, purified and concentrated using LentiX Concentrator (Clontech™), according to the manufacturer instructions. LTR: long terminal repeat, eIFα: eukaryotic initiation factor alpha, scFv: single-chain variable fragment, C9 TAG: C9 peptide TETSQVAPA, (SEQ ID NO: 1678) IRES: Internal Ribosome Entry Site, WPRE: Woodchuck Hepatitis Virus Posttranscriptional Regulatory Element. (B) T cells were transduced with the lentiviruses to generate Anti-CAIX CART Cells, which are able to recognize CAIX positive RCC, and also release Anti-PD-L1 IgG1 or IgG4 in the tumor microenvironment to block PD-1/PD-L1-induced T cell exhaustion. (C) Percentage of CART cells 14 days after transduction, representing the stable long-term expression of CAR by the integrated lentiviruses in CD8+ T cells. The CD8+ T cells were selected using Dynabeads™ CD8 Positive isolation Kit (Life Technologies) and activated with Dynabeads™ Human T Cell Activator CD3/CD28 (Life Technologies) in the presence of IL-21 50 U/mL. IL-21 was added to the medium every 2 days. After 14 days, the CART cells were incubated with human CAIX-Fc or BCMA-Fc, followed by incubation with an APC conjugated anti-human Fc IgG and analyzed by FACS. (D) Concentration of IgG secreted to the medium of transduced T cells evaluated by Human IgG ELISA Quantitation Set (Bethyl Laboratories). (E) Concentration of Anti-PD-L1 antibodies in the supernatant of 293T Cells transduced with lentiviruses containing Anti-CAIX or Anti-BCMA CAR and Anti-PD-L1 IgG1, Anti-PD-L1 IgG4 or unspecific Anti-SARS IgG1 sequences. The antibodies in the supernatant were purified with Protein A sepharose beads (GE Healthcare) and biotinylated using the EZ-Link Sulfo-NHS-LC-Biotin (Thermo Scientific™). These antibodies were incubated with 5 μg/mL of human PD-L1 pre-immobilized in the 96 wells MaxiSorp plate (Nunc™). The biotinylated antibodies were detected by incubation with streptavidin-HRP for 1 h and developed with TMB. The absorbance was read at k=450 nm. *P<0.001 compared to Anti BCMA/Anti SARS IgG1 and Anti-CAIX/Anti-SARS IgG1. **P<0.05 compared to Anti-CAIX/Anti-PD-L1 IgG1. (F and G) Clonal Expansion of CD8+ CART cells. (F) Concentration of CART cells versus days in the presence of skrc-52 CAIX+/PD-L1− cells. *P<0.05 comparing all CARS to Anti-BCMA/Anti-SARS IgG1. (G) Percentage of transduced T cells versus days in the presence of skrc-52 CAIX positive cells.*P<0.05 comparing all CARS to Anti-BCMA/Anti-SARS IgG1. The CD8+ CART cells were previously cultivated for five days after transduction with Anti CAIX CAR able to express anti-PD-L1 IgG1 (AntiCAIX/Anti-PD-L1 IgG1), IgG4 (Anti-CAIX/Anti-PD-L1 IgG4) or a unspecific Anti-SARS Ab (Anti-CAIX/Anti SARS IgG1) or Anti-BCMA CAR (negative control) able to express an unspecific anti-SARS Ab (Anti-BCMA/Anti SARS IgG1) and activated with Dynabeads™ Human T Activator CD3/CD28 (Life Technologies) in the presence of IL-21 50 U/mL. The beads were removed and the CART cells were cultured with skrc52 CAIX+PD-L1− and IL-21 (50 U/mL), which was added to the medium every 2 days for 21 days. The results represent the average±SD of three donors in duplicate.

[0028] FIG. 17 is a series of graphs that illustrate CART cell effector function. (A) Viability of Skrc59 CAIX+/ PD-L1+ cells or (B) Skrc52 CAIX−/ PD-L1− cells incubated overnight (O.N.) with CART cells Anti-CAIX/Anti-PD-L1 IgG1, Anti-CAIX/Anti-PD-L1 IgG4, Anti-CAIX/Anti SARS IgG1 or Anti-BCMA/Anti SARS IgG1. These CART cells were used 4 days after lentiviral transduction. The cell viability was evaluated by MTT (Molecular Probes™). *P<0.05 for all CART cells compared to Anti BCMA/Anti SARS IgG1 (C) IL2 released by CART cells after overnight contact with Skrc59 CAIX+/PD-L1+ cells or (D) Skrc52 CAIX−/PD-L1− cells. The IL-2 secretion was evaluated using the Human IL-2 ELISA Ready-SET-Go Kit (eBioscience™)*P<0.001 for all CART cells compared to Anti BCMA/Anti SARS IgG1. (E) IFNγ released by CART cells after overnight contact with Skrc59 CAIX+/PD-L1+ or (F) Skrc52 CAIX−/ PD-L1-cells. The IFNγ secretion was evaluated using the Human IFNγ ELISA Ready-SET-Go Kit (eBiosciences™). *P<0.05 for all CART cells compared to Anti-BCMA/Anti-SARS IgG1. (G) Ab-dependent cell-mediated cytotoxicity of skrc59 CAIX+/PD-L1+ or (H) skrc52 CAIX−/PD-L1-after incubation with the supernatant (SN) of CART cells containing 500 ng/mL of the Anti-PD-L1 IgG1, Anti-PD-L1 IgG4 or the Anti-SARS IgG1. To obtain the antibodies, CART cells were incubated for six days with Dynabeads™ Human T Activator CD3/CD28 (Life Technologies) in the presence of IL-21 50 U/mL. After 7 days, the medium containing the mAbs was harvested NK cells were purified using an EasySep™ Human NK Cell Enrichment Kit (StemCell™ Technologies). RCC cell lines Skrc59 CAIX+PD-L1+ and Skrc52 CAIX− PD-L1− were used as target cells and plated at 1.5×10³/well in a 96-well plate. RCC cells were incubated for 1 hour, 37° C., with 50 μL of the CART cells supernatant adjusted for 500 ng/mL of the respective Ab Anti-PD-L1 IgG1, Anti-PD-L1 IgG4 or Anti-SARS IgG1. After the incubation, the cells were washed with medium and incubated with 12.5:1, 25:1 or 50:1 NK cells for 4 h, 37° C. Culture supernatants were harvested by centrifugation and LDH measured in the supernatant by CytoTox 96® Non-Radioactive Cytotoxicity Assay (Promega™) at 490 nm. These results represent the average±SD of three donors in duplicate.

[0029] FIG. 18 is a series of graphs that depict CART cells expression of exhaustion markers. (A) Lag3, (B) Tim3 and (C) PD-1 expression. *P<0.05 compared to Anti-CAIX/Anti-SARS IgG1 and Anti-BCMA/Anti-SARS IgG1. The CD8+ CART cells were selected using Dynabeads™ CD8 Positive isolation Kit (Life Technologies), activated with Dynabeads™ Human T Activator CD3/CD28 (Life Technologies) and transduced with the following CARs: Anti-CAIX/Anti-PD-L1 IgG1, Anti-CAIX/Anti-PD-L1 IgG4, Anti-CAIX/Anti SARS IgG1 or Anti-BCMA/Anti SARS IgG1. These cells were cultured in the presence of IL-21 50 U/mL and Dynabeads™ Human T Activator CD3/CD28 for five days. After this period the CART cells were co-cultured with Skrc-59 CAIX+PD-L1+ for 2 days in order to stimulate exhaustion. CART cells were stained with FITC-conjugated anti-human PD-1, PE-conjugated anti-human Tim3 and PerCP/Cy5.5 anti-human Lag3 and analyzed by FACS. (D) Viability of Skrc59 CAIX positive/PD-L1 positive cells after incubation with exhausted CART cells. The cell viability was evaluated by MTT (Molecular Probes). *P<0.05 compared to both Anti-CAIX/Anti-SARS IgG1 and Anti-BCMA/Anti-SARS IgG1. **P<0.05 compared to Anti-CAIX/Anti-PD-L1 IgG1. These results represent the average±SD of three donors.

[0030] FIG. 19 is a series of images and graphs that depict the effect that CART cells have in an orthotopic model of human RCC. (A) NSG Mice (N=35) were injected with 5.0×104 skrc-59 CAIX positive, PD-L1 positive and luciferase positive RCC cells. After a week, the mice were injected with 1.0×107 CART or untransduced T cells IV (Day 0). The CART cells were previously transduced with the following lentiviral sequences: Anti-BCMA CAR/Anti-SARS IgG1, Anti-CAIX CAR/Anti SARS IgG1, Anti-CAIX CAR/Anti-PD-L1 IgG1 and Anti-CAIX CAR/Anti-PD-L1 IgG4 (N=6 mice per group). The tumor bioluminescence was quantified after 5 minutes of luciferin IP injection using IVIS. A. Imaging of the tumors before CART injection (Day 0), and after 7, 14, 23 and 30 days after first CART cells injection. A second injection of 2.5×106 cells was made on day 17. (B) Imaging of the tumors after excision at day 30. Scale bar=1 cm. (C) Tumor growth curve. *P<0.05 when Anti-PD-L1 IgG1 and IgG4 groups were compared to Anti-BCMA/Anti-SARS IgG1 and **P<0.05 when Anti-PD-L1 IgG1 and IgG4 groups were compared to Anti-CAIX/Anti-SARS IgG1. (D) Tumor weight after 30 days of treatment. *P<0.05 compared with Anti-BCMA/Anti SARS IgG1 CAR, **P<0.05 compared with Anti-CAIX/Anti-SARS IgG1.

[0031] FIG. 20 is a series of graphs and histological images that depict antitumor activity from CART cells. (A) Expression of exhaustion markers in tumor infiltrating lymphocytes (TIL). The kidney tumors from all mice were divided in two parts and one of them was fragmented in small pieces and digested with collagenase and DNAse to extraction of TIL. The CART cells were analyzed for the exhaustion markers PD-1, Tim-3 and Lag3. *P<0.05 compared with untransduced, Anti-BCMA/Anti SARS IgG1 CAR and Anti-CAIX/Anti-SARS IgG1. (B) Detection of Ki67 as a tumor cell proliferation marker and granzyme B to analyze CART cells activity in the tissue. Four-micrometer sections of formalin-fixed, paraffin-embedded tissues were dewaxed and rehydrated in a decreasing ethanol series. Endogenous peroxidase activity was quenched using 3% hydrogen peroxide. The antigen retrieval was performed using pressure cooker in citrate buffer (pH=6.0) for 45 seconds at 123° C., 15 PSI. The tissue sections were incubated for 45 minutes with the rabbit anti human Ki67 polyclonal Ab 1:2000 (Vector, VP-K451), mouse anti-human PD-L1 mAb 10.4 μg/mL (Clone 405.9A11) developed by Dr. Gordon Freeman (Boston, MA), biotinylated CAIX-Fc protein 17 μg/mL (produced in our lab), rabbit anti human granzyme B polyclonal Ab (Abcam, ab4059) 1:100 or rabbit anti-human NCAM (CD56) mAb 1:100 (Abcam, ab133345), followed by secondary HRP conjugated anti-rabbit Ab or HRP-Avidin. The slides were developed using 3,3′-diaminobenzidine (DAB) and counterstained with hematoxylin. The images were obtained in an Olympus BX51 microscopy using a DP71 digital camera (Olympus) and analyzed in the DP Controller Software (Olympus™). The scale bars represent the magnification of the images of each column [500 μm (40×), 100 μm (200×) or 50 μm (400×)].(C) A series of graphs present percentage quantification of TIL staining positive for Granzyme B, PD-L1-IHC, and Ki67. Also presented in (C) is a Ki67-DAB Pixel count of TILs.

[0032] FIG. 21 is a series of graphs that depict the evaluation of IL-2 versus IL-21 to CD8+ CART cells proliferation. A and B. Proliferation of CART transduced cells in the presence of IL-2 or IL-21 evaluated 48 h, 72 h and 120 h after transduction with lentiviruses. (A) Anti-CAIX CART cells or (B) Unspecific Anti-BCMA CART cells (both with ZsGreen in the second cassette). The CD8+ T cells were selected using Dynabeads™ CD8 Positive isolation Kit (Life Technologies) and activated with Dynabeads™ Human T Activator CD3/CD28 (Life Technologies) in the presence of IL2 or IL-21 50 U/mL (Peprotech™). The CART cells transduction was evaluated by ZsGreen expression using FACS. The data represents the average±SD of two donors. *p<0.05 comparing IL-21 with non treated control (Ctr); **p<0.05 comparing IL21 with IL-2. C and D. Viability of RCC cells treated with CD8+ CART cells cultivated in the presence of IL-2 or IL-21. The viability was evaluated by MTT after an overnight incubation of CART cells Anti-BCMA, Anti-CAIX or Untransduced T cells with (C) Skrc-59 CAIX+/PD-L1+ and (F) Skrc-52 CAIX−/PD-L1− RCC cells. The CART cells were previously cultivated in the presence of IL2 or IL-21 50 U/mL for 120 hours. These results represent the average±SD of two donors in triplicate. *P<0.05 comparing Anti-CAIX CAR with Anti-BCMA CAR or untransduced T cells.

[0033] FIG. 22 is a series of flow cytometry graphs that depict the expression of PD-1 and CAIX in the renal cell carcinoma (RCC) lines. (A) Negative control, (B) Skrc52 CAIX− PD-L1−, (C) Skrc52 CAIX+PD-L1−, (D) Skrc59 CAIX+PD-L1+. The cells were stained with Anti-human CAIX antibody developed with APC-Anti-human Fc IgG and Biotinylated Anti human PD-L1 antibody developed with PE-Avidin. The analysis was performed by FACS.

[0034] FIG. 23 is a series of graphs that depict the characterization of CART cells. (A) Proliferation of total CD8+ T cells two or four days after transduction Anti CAIX CAR/Anti-PD-L1 IgG1), (Anti-CAIX CAR/Anti-PD-L1 IgG4), Anti-CAIX CAR/Anti SARS IgG1) or Anti-BCMA CAR/Anti SARS IgG1). The CD8+ T cells were selected using Dynabeads™ CD8 Positive isolation Kit (Life Technologies) and activated with Dynabeads™ Human T Activator CD3/CD28 (Life Technologies) in the presence of IL-21 50 U/mL. IL-21 was added to the medium every 2 days. The proliferation was evaluated by FACS using Counting Beads (Molecular Probes). (B) Concentration of CAR-transduced T cells two and four days after transduction. The CART cells were incubated with human CAIX-Fc or BCMA-Fc, followed by incubation with an APC conjugated anti-human Fc IgG and analyzed by FACS. (C) Percentage of CART cells 2 and 4 days after transduction. The results represent the average±SD of three donors in duplicate.

[0035] FIG. 24 is a series of graphs that depict the effect that CART cells have in an orthotopic model of human RCC. (A) Comparison of tumor size detected by bioluminescence versus days among the CART cells groups. NSG Mice (N=35) were injected in the renal capsule with 5.0×104 skrc-59 CAIX+, PD-L1+ and luciferase+RCC cells. After a week, the mice were injected with 1.0×107 CART or untransduced T cells IV. The CART cells were previously transduced with the following lentiviral sequences: Anti-BCMA CAR/Anti-SARS IgG1, Anti-CAIX CAR/Anti SARS IgG1, Anti-CAIX CAR/Anti-PD-L1 IgG1 and Anti-CAIX CAR/Anti-PD-L1 IgG4 (N=6 mice per group). The tumor bioluminescence was quantified after 5 minutes of luciferin IP injection using IVIS. In the Day 17, more 2.5×106 CART cells were injected. *P<0.05 compared to anti-BCMA CART cells. **P<0.05 compared to untransduced T cells, ***P<0.05 compared to Anti-CAIX/Anti-SARS IgG1. (B) Percentage of T cells in the mice blood after 8 days of treatment. *P<0.05 compared to untransduced T cells. **P<0.05 compared to all Anti-CAIX CARs. The red blood cells were lysed with ACK Lysing Buffer (Lonza™) and the remaining cells were stained with Pacific Blue conjugated Anti-human CD45 and analyzed by FACS. (C) Total tumor infiltrating lymphocytes (TIL) after 30 days of treatment with CART cells. The tumors and kidney from all mice were divided in two parts and one of them was fragmented in small pieces and digested with collagenase and DNAse to extraction of TTL. The cells were stained with Pacific Blue conjugated Anti-human CD45 and analyzed by FACS.

[0036] FIG. 25 is a series of graphs and histological images that depict Human natural killer (NK) cells in the tumors treated with Anti-CAIX CART cells releasing anti-PD-L1 IgG1 Ab. (A) Percentage of CD56+ cells (NK marker) in the tumors. Two mice of each group were injected with 4.5×106 NK cells one day before the euthanasia. The kidney tumors from all mice were divided in two parts and one of them was fragmented in small pieces and digested with collagenase and DNAse to extraction of NK. NK cells present in the tumor were stained with APC-Anti-CD56 Ab and analyzed by FACS. *P<0.05. (B) CD56+ cells into the excised tumors detected by IHC and quantified using IHC Profiler Plugin of ImageJ Software. Four-micrometer sections of formalin-fixed, paraffin-embedded tissues were dewaxed and rehydrated in a decreasing ethanol series. Endogenous peroxidase activity was quenched using 3% hydrogen peroxide. The antigen retrieval was performed using pressure cooker in citrate buffer (pH=6.0) for 45 seconds at 123° C., 15 PSI. The tissue sections were incubated for 45 minutes with the rabbit anti-human CD56 mAb 1:100 (Abcam, ab133345), followed by secondary HRP conjugated anti-rabbit or anti-mouse Ab. The slides were developed using 3,3′-diaminobenzidine (DAB) and counterstained with hematoxylin. The images were obtained in an Olympus BX51 microscopy using a DP71 digital camera (Olympus) and analyzed in the DP Controller Software (Olympus). The quantification was performed using the IHC Profiler Plugin of ImageJ Software (23). The scale bars represent the magnification of the images (400×). *P<0.05 compared with untransduced, **P<0.05 compared with untransduced and Anti-BCMA/Anti-SARS IgG1.

### DETAILED DESCRIPTION OF THE INVENTION

[0037] The present invention relates to a chimeric antigen receptor (CAR) particularly adapted to immune cells used in immunotherapy.

[0038] In one embodiment, a double immunotherapeutic strategy is described based on the blocking of T cell exhaustion using anti-PD-L1 antibodies secreted by targeted anti-CAIX CAR T cells combined in a single lentivirus construct for improving cancer treatment.

[0039] An emerging mechanism associated with the progression of RCC and other tumors is the immune checkpoint pathway, which consists in cellular interactions that prevent excessive activation of T cells under normal conditions, allowing T cell function in a self-limited manner. As an evasion mechanism, many tumors are able to stimulate the expression of immune checkpoint molecules, resulting in an anergic phenotype of T cells that cannot restrain tumor progression. Emerging clinical data highlight the importance of one inhibitory ligand and receptor pair as an immune checkpoint: the programmed death-ligand 1 (PD-L1; B7-H1 and CD274) and programmed death receptor-1 (PD-1; CD279), in preventing killing of cancer cells by cytotoxic T-lymphocytes. PD1 receptor is expressed by many cell types like T cells, B cells, Natural Killer cells (NK) and host tissues. Tumors and Antigen-presenting cells (APC) expressing PD-L1 can block T cell receptor (TCR) signaling of cytotoxic T-lymphocytes through binding to receptor PD-1, decreasing the production of cytokines and T cell proliferation. PD-L1 overexpression can be found in many tumor types and may also mediate an immunosuppressive function through its interaction with other proteins, including CD80 (B7.1), blocking its ability to activate T cells through binding to CD28.

[0040] Genetic engineering of human lymphocytes to express tumor-directed chimeric antigen receptors (CAR) can produce antitumor effector cells that bypass tumor immune escape mechanisms that are due to abnormalities in protein-antigen processing and presentation. Moreover, these transgenic receptors can be directed to tumor-associated antigens that are not protein-derived. In certain embodiments of the invention there are lymphocytes (CARTS) that are modified to comprise at least a CAR, and in particular embodiments of the invention a single CAR targets two or more antigens. In preferred embodiments, the CARTS are further modified to express and secrete one or more polypeptides, such as for example an antibody or a cytokine. Such CARTS are referred to herein as armed CARTS. Armed CARTS allow for simultaneous secretion of the polypeptide locally at the targeted site (i.e., tumor site).

[0041] A modified TCR called chimeric antigen receptor (CAR) containing single chain variable antibody fragment (scFv) previously selected by high affinity against a specific tumor associated antigen is a powerful new approach against cancer. The scFv presented in the CAR is linked to an intracellular signaling block that includes CD3ζ to induce T cell activation followed by antigen binding. This structure is characteristic for first-generation CARs, which were improved to second- and generation CARs that link the signaling co-stimulatory endodomains of CD28, 4-1BB, or OX40 to CD3 or 3^{rd}-generation CARs that links two elements to CD3ζ in tandem. These endodomains are required for complete T cell activation during TCR recognition by antigen-presenting cells (APCs), improving cytokine production and proliferation of CAR-T cells. The effect of CART cells has heretofore been modest for the treatment of solid tumors, due to difficulty in finding unique tumor associated antigens, inefficient homing of T cells to tumor locations, low persistence of T cells in the body and the immunosuppressive microenvironment of solid tumors.

[0042] In particular cases, the lymphocytes include a receptor that is chimeric, non-natural and engineered at least in part by the hand of man. In particular cases, the engineered chimeric antigen receptor (CAR) has one, two, three, four, or more components, and in some embodiments the one or more components facilitate targeting or binding of the lymphocyte to one or more tumor antigen-comprising cancer cells.

[0043] The CAR according to the invention generally comprises at least one transmembrane polypeptide comprising at least one extracellular ligand-biding domain and; one transmembrane polypeptide comprising at least one intracellular signaling domain; such that the polypeptides assemble together to form a Chimeric Antigen Receptor.

[0044] The term “extracellular ligand-binding domain” as used herein is defined as an oligo- or polypeptide that is capable of binding a ligand. Preferably, the domain will be capable of interacting with a cell surface molecule. For example, the extracellular ligand-binding domain may be chosen to recognize a ligand that acts as a cell surface marker on target cells associated with a particular disease state.

[0045] In particular, the extracellular ligand-binding domain can comprise an antigen binding domain derived from an antibody against an antigen of the target.

[0046] As non limiting examples, the antigen of the target can be a tumor-associated surface antigen, such as ErbB2 (HER2/neu), carcinoembryonic antigen (CEA), epithelial cell adhesion molecule (EpCAM), epidermal growth factor receptor (EGFR), EGFR variant III (EGFRvIII), CD19, CD20, CD30, CD40, disialoganglioside GD2, ductal-epithelial mucine, gp36, TAG-72, glycosphingolipids, glioma-associated antigen, .beta.-human chorionic gonadotropin, alphafetoprotein (AFP), lectin-reactive AFP, thyroglobulin, RAGE-1, MN-CA IX, human telomerase reverse transcriptase, RU1, RU2 (AS), intestinal carboxyl esterase, mut hsp70-2, M-CSF, prostase, prostase specific antigen (PSA), PAP, NY-ESO-1, LAGA-1a, p53, prostein, PSMA, surviving and telomerase, prostate-carcinoma tumor antigen-1 (PCTA-1), MAGE, ELF2M, neutrophil elastase, ephrin B2, CD22, insulin growth factor (IGF1)-I, IGF-II, IGFI receptor, mesothelia, a major histocompatibility complex (MHC) molecule presenting a tumor-specific peptide epitope, 5T4, ROR1, Nkp30, NKG2D, tumor stromal antigens, the extra domain A (EDA) and extra domain B (EDB) of fibronectin and the A1 domain of tenascin-C(TnC Ai) and fibroblast associated protein (fap); a lineage-specific or tissue specific antigen such as CD3, CD4, CD8, CD24, CD25, CD33, CD34, CD133, CD138, CTLA-4, B7-1 (CD80), B7-2 (CD86), endoglin, a major histocompatibility complex (MHC) molecule, BCMA (CD269, TNFRSF 17), or a virus-specific surface antigen such as an HIV-specific antigen (such as HIV gpi20); an EBV-specific antigen, a CMV-specific antigen, a HPV-specific antigen, a Lasse Virus-specific antigen, an Influenza Virus-specific antigen as well as any derivate or variant of these surface markers.

[0047] Preferably, the CAR is specific for BMCA, CAIX, CCR4, PD-L1, PD-L2, PD1, Glucocorticoid-Induced Tumor Necrosis Factor Receptors (GITR), Severe acute respiratory syndrome (SARS), influenza, flavivirus or Middle East Respiratory Syndrome (MERS).

[0048] In a preferred embodiment, said extracellular ligand-binding domain is a single chain antibody fragment (scFv) comprising the light (V_{L}) and the heavy (V_{H}) variable fragment of a target antigen specific monoclonal antibody joined by a flexible linker.

[0049] In a more preferred embodiment, said scFv antibody is specific for BMCA, CAIX, CCR4, PD-L1, PD-L2, PD1, GITR, SARS, influenza, flavivirus or MERS.

[0050] Exemplary antibodies useful in constructing the CAR according to the invention includes antibodies disclosed in for example: WO/2005/060520, WO/2006/089141, WO/2007/065027, WO/2009/086514, WO/2009/079259, WO/2011/153380, WO/2014/055897, WO 2015/143194, WO 2015/164865, WO 2013/166500, and WO 2014/144061; PCT/US2015/054202, PCT/US2015/054010 and 62/144,729 the contents of which are hereby incorporated by reference in their entireties.

### PDL1 (68)

[0051] Exemplary anti-PDL1 antibodies include antibodies having containing a VH nucleotide sequence having SEQ ID NO: 1485 and a VL nucleotide sequence having SEQ ID NO: 1487; a VH nucleotide sequence having SEQ ID NO: 1485 and a VL nucleotide sequence having SEQ ID NO: 1487; a VH nucleotide sequence having SEQ ID NO: 1489 and a VL nucleotide sequence having SEQ ID NO: 1491; a VH nucleotide sequence having SEQ ID NO: 1493 and a VL nucleotide sequence having SEQ ID NO: 1495; a VH nucleotide sequence having SEQ ID NO: 1497 and a VL nucleotide sequence having SEQ ID NO: 1499; a VH nucleotide sequence having SEQ ID NO: 1501 and a VL nucleotide sequence having SEQ ID NO: 1503; a VH nucleotide sequence having SEQ ID NO: 1505 and a VL nucleotide sequence having SEQ ID NO: 1507; a VH nucleotide sequence having SEQ ID NO: 1509 and a VL nucleotide sequence having SEQ ID NO: 1511; a VH nucleotide sequence having SEQ ID NO: 1513 and a VL nucleotide sequence having SEQ ID NO: 1515; a VH nucleotide sequence having SEQ ID NO: 1517 and a VL nucleotide sequence having SEQ ID NO: 1519; a VH nucleotide sequence having SEQ ID NO: 1521 and a VL nucleotide sequence having SEQ ID NO: 1523; a VH nucleotide sequence having SEQ ID NO: 1525 and a VL nucleotide sequence having SEQ ID NO: 1527; a VH nucleotide sequence having SEQ ID NO: 1529 and a VL nucleotide sequence having SEQ ID NO: 1531; a VH nucleotide sequence having SEQ ID NO: 1533 and a VL nucleotide sequence having SEQ ID NO: 1535; a VH nucleotide sequence having SEQ ID NO: 1537 and a VL nucleotide sequence having SEQ ID NO: 1539.

[0052] Exemplary anti-PDL1 antibodies include antibodies having containing a VH amino acid sequence having SEQ ID NO: 970 and a VL amino acid sequence having SEQ ID NO: 971; a VH amino acid having SEQ ID NO: 1486 and a VL polypeptide sequence having SEQ ID NO: 1488 a VH amino acid having SEQ ID NO: 1490 and a VL polypeptide sequence having SEQ ID NO: 1492 a VH amino acid having SEQ ID NO: 1494 and a VL polypeptide sequence having SEQ ID NO: 1496 a VH amino acid having SEQ ID NO: 1498 and a VL polypeptide sequence having SEQ ID NO: 1500 a VH amino acid having SEQ ID NO: 1502 and a VL polypeptide sequence having SEQ ID NO: 1504 a VH amino acid having SEQ ID NO: 1506 and a VL polypeptide sequence having SEQ ID NO: 1508 a VH amino acid having SEQ ID NO: 1510 and a VL polypeptide sequence having SEQ ID NO: 1512 a VH amino acid having SEQ ID NO: 1514 and a VL polypeptide sequence having SEQ ID NO: 1516 a VH amino acid having SEQ ID NO: 1518 and a VL polypeptide sequence having SEQ ID NO: 1520 a VH amino acid having SEQ ID NO: 1522 and a VL polypeptide sequence having SEQ ID NO: 1524 a VH amino acid having SEQ ID NO: 1526 and a VL polypeptide sequence having SEQ ID NO: 1528 a VH amino acid having SEQ ID NO: 1530 and a VL polypeptide sequence having SEQ ID NO: 1532 a VH amino acid having SEQ ID NO: 1534 and a VL polypeptide sequence having SEQ ID NO: 1536 a VH amino acid having SEQ ID NO: 1538 and a VL polypeptide sequence having SEQ ID NO: 1540.

[0053] In other embodiments the anti-PDL1 antibodies have a heavy chain with three CDRs including the amino acid sequences SEQ ID NO: 1541, 1554, 1569 respectively and a light chain with three CDRs including the amino acid sequences 1584, 1599, 1610 respectively; or a heavy chain with three CDRs comprising the amino acid sequences 1543, 1556, 1571 and a light chain with three CDRs comprising the amino acid sequences 1586, 1600, 1612; or a heavy chain with three CDRs comprising the amino acid sequences 1544, 1557, 1572 and a light chain with three CDRs comprising the amino acid sequences 1587, 1601, 1613; or a heavy chain with three CDRs comprising the amino acid sequences 1545, 1558, 1573 and a light chain with three CDRs comprising the amino acid sequences 1588, 1602, 1614; or a heavy chain with three CDRs comprising the amino acid sequences 1546, 1559, 1574 and a light chain with three CDRs comprising the amino acid sequences 1589, 1603, 1615; or a heavy chain with three CDRs comprising the amino acid sequences 1547, 1560, 1575 and a light chain with three CDRs comprising the amino acid sequences 1590, 1604, 1616; or a heavy chain with three CDRs comprising the amino acid sequences 1548, 1561, 1576 and a light chain with three CDRs comprising the amino acid sequences 1591, 1605, 1617; or a heavy chain with three CDRs comprising the amino acid sequences 1541, 1562, 1577 and a light chain with three CDRs comprising the amino acid sequences 1592, 1599, 1618; or a heavy chain with three CDRs comprising the amino acid sequences 1549, 1563, 1578 and a light chain with three CDRs comprising the amino acid sequences 1593, 1606, 1619; or a heavy chain with three CDRs comprising the amino acid sequences 1550, 1564, 1579 and a light chain with three CDRs comprising the amino acid sequences 1594, 1607, 1620; or a heavy chain with three CDRs comprising the amino acid sequences 1551, 1565, 1580 and a light chain with three CDRs comprising the amino acid sequences 1595, 1599, 1621; or a heavy chain with three CDRs comprising the amino acid sequences 1542, 1566, 1581 and a light chain with three CDRs comprising the amino acid sequences 1596, 1599, 1622; or a heavy chain with three CDRs comprising the amino acid sequences 1552, 1567, 1582 and a light chain with three CDRs comprising the amino acid sequences 1597, 1608, 1623; or a heavy chain with three CDRs comprising the amino acid sequences 1553, 1568, 1583 and a light chain with three CDRs comprising the amino acid sequences 1598, 1609 1624.

### Sars (26)

[0054] Exemplary SARS neutralizing antibodies include antibodies having containing a VH nucleotide sequence having SEQ ID NO: 1626 and a VL nucleotide sequence having SEQ ID NO: 1628; a VH nucleotide sequence having SEQ ID NO: 1630 and a VL nucleotide sequence having SEQ ID NO: 1639; a VH nucleotide sequence having SEQ ID NO: 1634 and a VL nucleotide sequence having SEQ ID NO: 1640; a VH nucleotide sequence having SEQ ID NO: 1632 and a VL nucleotide sequence having SEQ ID NO: 1641; a VH nucleotide sequence having SEQ ID NO: 1633 and a VL nucleotide sequence having SEQ ID NO: 1642; a VH nucleotide sequence having SEQ ID NO: 1634 and a VL nucleotide sequence having SEQ ID NO: 1643; a VH nucleotide sequence having SEQ ID NO: 1635 and a VL nucleotide sequence having SEQ ID NO: 1644; a VH nucleotide sequence having SEQ ID NO: 1636 and a VL nucleotide sequence having SEQ ID NO: 1645; a VH nucleotide sequence having SEQ ID NO: 1637 and a VL nucleotide sequence having SEQ ID NO: 1646

### Cxcr4 (33)

[0055] Exemplary anti-CXCR4 antibody include antibodies having a VH amino acid sequence having SEQ ID NO: 771 and a VL amino acid sequence having SEQ ID NO: 779; a VH amino acid sequence having SEQ ID NO: 772 and a VL amino acid sequence having SEQ ID NO: 780; a VH amino acid sequence having SEQ ID NO: 773 and a VL amino acid sequence having SEQ ID NO: 781; a VH amino acid sequence having SEQ ID NO: 774 and a VL amino acid sequence having SEQ ID NO: 782; a VH amino acid sequence having SEQ ID NO: 775 and a VL amino acid sequence having SEQ ID NO: 783; a VH amino acid sequence having SEQ ID NO: 776 and a VL amino acid sequence having SEQ ID NO: 784; a VH amino acid sequence having SEQ ID NO: 777 and a VL amino acid sequence having SEQ ID NO: 785; or a VH amino acid sequence having SEQ ID NO: 778 and a VL amino acid sequence having SEQ ID NO: 786.

[0056] In other embodiments the anti-CXCR4 antibodies have a heavy chain with three CDRs including the amino acid sequences SEQ ID NO: 803, 804, 805 respectively and a light chain with three CDRs including the amino acid sequences 806, 807, 808 respectively; or a heavy chain with three CDRs comprising the amino acid sequences 809, 810, 811, respectively and a light chain with three CDRs comprising the amino acid sequences 812, 813, 814, respectively; or a heavy chain with three CDRs comprising the amino acid sequences 815, 816, 817 respectively and a light chain with three CDRs comprising the amino acid sequences 818, 819, 820 respectively; or a heavy chain with three CDRs comprising the amino acid sequences 827, 828, 829 respectively and a light chain with three CDRs comprising the amino acid sequences 830, 831, 832 respectively; or a heavy chain with three CDRs comprising the amino acid sequences 833, 834, 835, respectively and a light chain with three CDRs comprising the amino acid sequences 836, 837, 838, respectively; or a heavy chain with three CDRs comprising the amino acid sequences 839, 840, 841 respectively and a light chain with three CDRs comprising the amino acid sequences 842, 843, 844 respectively.

### Carbonic Anhydrase IX (40)

[0057] Exemplary anti-CA IX antibodies include antibodies having containing a VH amino acid sequence having SEQ ID NO: 845 and a VL amino acid sequence having SEQ ID NO: 846; a VH amino acid sequence having SEQ ID NO: 847 and a VL amino acid sequence having SEQ ID NO: 868; a VH amino acid sequence having SEQ ID NO: 848 and a VL amino acid sequence having SEQ ID NO: 869; a VH amino acid sequence having SEQ ID NO: 849 and a VL amino acid sequence having SEQ ID NO: 870; a VH amino acid sequence having SEQ ID NO: 850 and a VL amino acid sequence having SEQ ID NO: 871; a VH amino acid sequence having SEQ ID NO: 851 and a VL amino acid sequence having SEQ ID NO: 872; a VH amino acid sequence having SEQ ID NO: 852 and a VL amino acid sequence having SEQ ID NO: 873; a VH amino acid sequence having SEQ ID NO: 853 and a VL amino acid sequence having SEQ ID NO: 874; a VH amino acid sequence having SEQ ID NO: 854 and a VL amino acid sequence having SEQ ID NO: 875; a VH amino acid sequence having SEQ ID NO: 855 and a VL amino acid sequence having SEQ ID NO: 876; a VH amino acid sequence having SEQ ID NO: 856 and a VL amino acid sequence having SEQ ID NO: 877; a VH amino acid sequence having SEQ ID NO: 857 and a VL amino acid sequence having SEQ ID NO: 878; a VH amino acid sequence having SEQ ID NO: 858 and a VL amino acid sequence having SEQ ID NO: 879; a VH amino acid sequence having SEQ ID NO: 859 and a VL amino acid sequence having SEQ ID NO: 880; a VH amino acid sequence having SEQ ID NO: 860 and a VL amino acid sequence having SEQ ID NO: 881; a VH amino acid sequence having SEQ ID NO: 861 and a VL amino acid sequence having SEQ ID NO: 882 a VH amino acid sequence having SEQ ID NO: 862 and a VL amino acid sequence having SEQ ID NO: 883; a VH amino acid sequence having SEQ ID NO: 863 and a VL amino acid sequence having SEQ ID NO: 884; a VH amino acid sequence having SEQ ID NO: 864 and a VL amino acid sequence having SEQ ID NO: 885; a VH amino acid sequence having SEQ ID NO: 865 and a VL amino acid sequence having SEQ ID NO: 886; a VH amino acid sequence having SEQ ID NO: 866 and a VL amino acid sequence having SEQ ID NO: 887; a VH amino acid sequence having SEQ ID NO: 867 and a VL amino acid sequence having SEQ ID NO: 888.

[0058] In other embodiments the anti-CA IX antibodies have a heavy chain with three CDRs including the amino acid sequences SEQ ID NO: 803, 804, 805 respectively and a light chain with three CDRs including the amino acid sequences 806, 807, 808 respectively; or a heavy chain with three CDRs comprising the amino acid sequences 899, 915, 909 and a light chain with three CDRs comprising the amino acid sequences 905, 906, 952 or a heavy chain with three CDRs comprising the amino acid sequences 899, 915, 909 and a light chain with three CDRs comprising the amino acid sequences 935, 943, 953 or a heavy chain with three CDRs comprising the amino acid sequences 899, 915, 909 and a light chain with three CDRs comprising the amino acid sequences 935, 906, 954 or a heavy chain with three CDRs comprising the amino acid sequences 910, 916, 923 and a light chain with three CDRs comprising the amino acid sequences 936, 944, 955 or a heavy chain with three CDRs comprising the amino acid sequences 899, 915, 909 and a light chain with three CDRs comprising the amino acid sequences 936, 944, 956 or a heavy chain with three CDRs comprising the amino acid sequences 911, 917, 924 and a light chain with three CDRs comprising the amino acid sequences 937, 945, 957 or a heavy chain with three CDRs comprising the amino acid sequences 899, 915, 909 and a light chain with three CDRs comprising the amino acid sequences 935, 946, 958 or a heavy chain with three CDRs comprising the amino acid sequences 899, 915, 909 and a light chain with three CDRs comprising the amino acid sequences 938, 946, 959 or a heavy chain with three CDRs comprising the amino acid sequences 899, 915, 909 and a light chain with three CDRs comprising the amino acid sequences 905, 946, 960 or a heavy chain with three CDRs comprising the amino acid sequences 899, 918, 925 and a light chain with three CDRs comprising the amino acid sequences 937, 947, 955 or a heavy chain with three CDRs comprising the amino acid sequences 899, 918, 926 and a light chain with three CDRs comprising the amino acid sequences 937, 945, 957 or a heavy chain with three CDRs comprising the amino acid sequences 912, 919, 927 and a light chain with three CDRs comprising the amino acid sequences 937, 943, 961 or a heavy chain with three CDRs comprising the amino acid sequences 899, 918, 928 and a light chain with three CDRs comprising the amino acid sequences 937, 906, 960 or a heavy chain with three CDRs comprising the amino acid sequences 899, 918, 928 and a light chain with three CDRs comprising the amino acid sequences 937, 906, 960 or a heavy chain with three CDRs comprising the amino acid sequences 913, 920, 929 and a light chain with three CDRs comprising the amino acid sequences 939, 948, 962 or a heavy chain with three CDRs comprising the amino acid sequences 899, 918, 930 and a light chain with three CDRs comprising the amino acid sequences 935, 944, 955 or a heavy chain with three CDRs comprising the amino acid sequences 899, 921, 931 and a light chain with three CDRs comprising the amino acid sequences 935, 944, 955 or a heavy chain with three CDRs comprising the amino acid sequences 912, 919, 932 and a light chain with three CDRs comprising the amino acid sequences 940, 949, 963 or a heavy chain with three CDRs comprising the amino acid sequences 899, 915, 909 and a light chain with three CDRs comprising the amino acid sequences 935, 943, 960 or a heavy chain with three CDRs comprising the amino acid sequences 914, 922, 933 and a light chain with three CDRs comprising the amino acid sequences 941, 950, 964 or a heavy chain with three CDRs comprising the amino acid sequences 912, 918, 934 and a light chain with three CDRs comprising the amino acid sequences 942, 951, 965.

### Cc-Chemokine Receptor 4 (Ccr4) (048)

[0059] Exemplary CC-chemokine receptor 4 (CCR4) antibodies include antibodies having containing a VH nucleotide sequence having SEQ ID NO: 969 and a VL nucleotide sequence having SEQ ID NO: 971; a VH nucleotide sequence having SEQ ID NO: 969 and a V_{L} nucleotide sequence having SEQ ID NO: 972.

[0060] Exemplary CCR4 antibodies include antibodies having containing a VH amino acid sequence having SEQ ID NO: 970 and a VL amino acid sequence having SEQ ID NO: 971.

[0061] In other embodiments the CCR4 antibodies have a heavy chain with three CDRs including the amino acid sequences SEQ ID NO: 973, 974, 975 respectively and a light chain with three CDRs including the amino acid sequences 976, 977, 978 respectively.

### Middle East Respiratory Syndrome Coronavirus (Mers-Cov). (85)

[0062] Exemplary anti-Middle East Respiratory Syndrome coronavirus (MERS-CoV) antibody include antibodies having a VH nucleotide sequence having SEQ ID NO: 677 and a VL nucleotide sequence having SEQ ID NO:679; a VH nucleotide sequence having SEQ ID NO: 681 and a VL nucleotide sequence having SEQ ID NO:683; a VH nucleotide sequence having SEQ ID NO: 685 and a VL nucleotide sequence having SEQ ID NO:687; a VH nucleotide sequence having SEQ ID NO: 689 and a VL nucleotide sequence having SEQ ID NO:692; a VH nucleotide sequence having SEQ ID NO: 693 and a VL nucleotide sequence having SEQ ID NO:695; a VH nucleotide sequence having SEQ ID NO: 697 and a VL nucleotide sequence having SEQ ID NO:699; and a VH nucleotide sequence having SEQ ID NO: 701 and a VL nucleotide sequence having SEQ ID NO:703.

[0063] Exemplary anti-Middle East Respiratory Syndrome coronavirus (MERS-CoV) antibody include antibodies having a VH amino acid sequence SEQ ID NO: 678 and a VL amino acid sequence having SEQ ID NO: 680; a VH amino acid sequence SEQ ID NO: 682 and a VL amino acid sequence having SEQ ID NO: 684; a VH amino acid sequence SEQ ID NO: 686 and a VL amino acid sequence having SEQ ID NO: 688; a VH amino acid sequence SEQ ID NO: 690 and a VL amino acid sequence having SEQ ID NO: 692; a VH amino acid sequence SEQ ID NO: 694 and a VL amino acid sequence having SEQ ID NO: 696; a VH amino acid sequence SEQ ID NO: 698 and a VL amino acid sequence having SEQ ID NO: 700; and a VH amino acid sequence SEQ ID NO: 702 and a VL amino acid sequence having SEQ ID NO: 704.

[0064] In other embodiments the anti-Middle East Respiratory Syndrome coronavirus (MERS-CoV) antibody has a heavy chain with three CDRs including the amino acid sequences of 705, 706, and 707 and a light chain with three CDRs including the amino acid sequences 722, 723, and 724; a heavy chain with three CDRs including the amino acid sequences of 708, 709, and 710 and a light chain with three CDRs including the amino acid sequences 725, 726, and 727; a heavy chain with three CDRs including the amino acid sequences of 711, 712, and 713 and a light chain with three CDRs including the amino acid sequences 728, 729, and 730; a heavy chain with three CDRs including the amino acid sequences of 711, 735, and 715 and a light chain with three CDRs including the amino acid sequences 731, 732, and 733; a heavy chain with three CDRs including the amino acid sequences of 711, 735, and 716 and a light chain with three CDRs including the amino acid sequences 737, 738, and 739; a heavy chain with three CDRs including the amino acid sequences of 717, 718, and 719 and a light chain with three CDRs including the amino acid sequences 736, 742, and 743; and a heavy chain with three CDRs including the amino acid sequences of 714, 720, and 721 and a light chain with three CDRs including the amino acid sequences 740, 729, and 741.

### Gitr (93)

[0065] Exemplary anti-human GITR antibody include antibodies having a VH nucleotide sequence having SEQ ID NO: 1361 and a VL nucleotide sequence having SEQ ID NO: 1363; a VH nucleotide sequence having SEQ ID NO: 1365 and a VL nucleotide sequence having SEQ ID NO:1367; a VH nucleotide sequence having SEQ ID NO: 1369 and a VL nucleotide sequence having SEQ ID NO: 1371; a VH nucleotide sequence having SEQ ID NO: 1381 and a VL nucleotide sequence having SEQ ID NO: 1375; a VH nucleotide sequence having SEQ ID NO: 1377 and a VL nucleotide sequence having SEQ ID NO: 1379; a VH nucleotide sequence having SEQ ID NO: 1381 and a VL nucleotide sequence having SEQ ID NO: 1383; a VH nucleotide sequence having SEQ ID NO: 1385 and a VL nucleotide sequence having SEQ ID NO: 1387; a VH nucleotide sequence having SEQ ID NO: 1389 and a VL nucleotide sequence having SEQ ID NO:1391; a VH nucleotide sequence having SEQ ID NO: 1393 and a VL nucleotide sequence having SEQ ID NO: 1395; a VH nucleotide sequence having SEQ ID NO: 1397 and a VL nucleotide sequence having SEQ ID NO: 1398; or a VH nucleotide sequence having SEQ ID NO: 1401 and a VL nucleotide sequence having SEQ ID NO: 1403.

[0066] Exemplary anti-human GITR antibody include antibodies having a VH amino acid sequence having SEQ ID NO: 1362 and a VL amino acid sequence having SEQ ID NO: 1364; a VH amino acid having SEQ ID NO: 1366 and a VL polypeptide sequence having SEQ ID NO:1368; a VH amino acid sequence having SEQ ID NO: 1371 and a VL amino acid sequence having SEQ ID NO: 1372; a VH amino acid sequence having SEQ ID NO: 1382 and a VL amino acid sequence having SEQ ID NO: 1376; a VH nucleotide sequence having SEQ ID NO: 1378 and a VL nucleotide sequence having SEQ ID NO: 1380; a VH amino acid having SEQ ID NO: 1382 and a VL polypeptide sequence having SEQ ID NO: 1384; a VH amino acid sequence having SEQ ID NO: 1386 and a VL amino acid sequence having SEQ ID NO: 1388; a VH amino acid sequence having SEQ ID NO: 1390 and a VL amino acid sequence having SEQ ID NO: 1392; a VH amino acid having SEQ ID NO: 1394 and a VL polypeptide sequence having SEQ ID NO: 1396; a VH amino acid sequence having SEQ ID NO: 1399 and a VL amino acid sequence having SEQ ID NO: 1400; or a VH amino acid sequence having SEQ ID NO: 1402 and a VL amino acid sequence having SEQ ID NO: 1404.

[0067] In other embodiments the anti-human GITR antibody has a heavy chain with three CDRs including the amino acid sequences 1405, 1406, and 1407 and a light chain with three CDRs including the amino acid sequences 1408, 1409, and 1410 respectively; a heavy chain with three CDRs including the amino acid sequences 1411, 1412, and 1413 and a light chain with three CDRs including the amino acid sequences 1414, 1415, and 1416 respectively; a heavy chain with three CDRs including the amino acid sequences 1417, 1418, and 1419 and a light chain with three CDRs including the amino acid sequences 1420, 1421, and 1422 respectively; a heavy chain with three CDRs including the amino acid sequences 1423, 1424, and 1425 and a light chain with three CDRs including the amino acid sequences 1426, 1427, and 1428 respectively; a heavy chain with three CDRs including the amino acid sequences 1429, 1430, and 1431 and a light chain with three CDRs including the amino acid sequences 1432, 1433, and 1434 respectively; a heavy chain with three CDRs including the amino acid sequences 1435, 1436, and 1437 and a light chain with three CDRs including the amino acid sequences 1438, 1439, and 1440 respectively; a heavy chain with three CDRs including the amino acid sequences 1441, 1442, and 1443 and a light chain with three CDRs including the amino acid sequences 1444, 1445, and 1446 respectively; a heavy chain with three CDRs including the amino acid sequences 1447, 1448, and 1449 and a light chain with three CDRs including the amino acid sequences 1450, 1451, and 1452 respectively; a heavy chain with three CDRs including the amino acid sequences 1453, 1454, and 1455 and a light chain with three CDRs including the amino acid sequences 1456, 1457, and 1458 respectively; a heavy chain with three CDRs including the amino acid sequences 1459, 1460, and 1461 and a light chain with three CDRs including the amino acid sequences 1462, 1463, and 1464 respectively; or a heavy chain with three CDRs including the amino acid sequences 1465, 1466, and 1467 and a light chain with three CDRs including the amino acid sequences 1468, 1469, and 1470 respectively.

### Flavivirus (73)

[0068] Exemplary anti-West Nile virus envelope protein E (WNE) antibody include antibodies having a VH nucleotide sequence having a VH amino acid sequence having SEQ ID NO: 1224 and a VL amino acid sequence having SEQ ID NO: 1226.

[0069] Exemplary anti-West Nile virus envelope protein E (WNE) antibody include antibodies having a VH nucleotide sequence having SEQ ID NO: 1225 and a VL nucleotide sequence having SEQ ID NO: 1227.

[0070] In other embodiments the anti-West Nile virus envelope protein E (WNE) antibody has a heavy chain with three CDRs including the amino acid sequences 1244, 1245, and 1246 and a light chain with three CDRs including the amino acid sequences 1247, 1248, and 1249 respectively.

### CCR4 (65)

[0071] Exemplary anti-CC-chemokine receptor 4 (CCR4) antibody include antibodies having a VH nucleotide sequence having SEQ ID NO: 1329 and a VL nucleotide sequence having SEQ ID NO: 1331; a VH nucleotide sequence having SEQ ID NO: 1333 and a V_{L} nucleotide sequence having SEQ ID NO:1335; a VH nucleotide sequence having SEQ ID NO: 1337 and a V_{L} nucleotide sequence having SEQ ID NO: 1192; a VH nucleotide sequence having SEQ ID NO: 1341 and a VL nucleotide sequence having SEQ ID NO: 1343; or a VH nucleotide sequence having SEQ ID NO: 1357 and a VL nucleotide sequence having SEQ ID NO:1359.

[0072] Exemplary anti-CC-chemokine receptor 4 (CCR4) antibody include antibodies having a V_{H} amino acid sequence having SEQ ID NO: 1330 and a V_{L} amino acid sequence having SEQ ID NO: 1332; a V_{H} amino acid sequence having SEQ ID NO: 1334 and a V_{L} amino acid sequence having SEQ ID NO: 1336; a V_{H} amino acid sequence having SEQ ID NO: 1338 and a V_{L} amino acid sequence having SEQ ID NO: 1340; a V_{H} amino acid sequence having SEQ ID NO: 1342 and a V_{L} amino acid sequence having SEQ ID NO: 1344; or a V_{H} amino acid sequence having SEQ ID NO: 1358 and a V_{L} amino acid sequence having SEQ ID NO: 1360.

[0073] In other embodiments the anti-CC-chemokine receptor 4 (CCR4) antibody has a heavy chain with three CDRs including the amino acid sequences 1203, 1208, and 1211 and a light chain with three CDRs including the amino acid sequences 1207, 1209, and 1216 respectively; or a heavy chain with three CDRs including the amino acid sequences 1204, 1208, and 1212 and a light chain with three CDRs including the amino acid sequences 1207, 1209, and 1217 respectively; or a heavy chain with three CDRs including the amino acid sequences 1204, 1208, and 1213 and a light chain with three CDRs including the amino acid sequences 1207, 1209, and 1217 respectively; or a heavy chain with three CDRs including the amino acid sequences 1205, 1208, and 1214 and a light chain with three CDRs including the amino acid sequences 1207, 1209, and 1218 respectively; or a heavy chain with three CDRs including the amino acid sequences 1206, 1208, and 1210 and a light chain with three CDRs including the amino acid sequences 1207, 1209, and 1220 respectively; or a heavy chain with three CDRs including the amino acid sequences 1202, 1208, and 1210 and a light chain with three CDRs including the amino acid sequences 1207, 1209, and 1219 respectively.

### Human Immunoglobulin Heavy Chain Variable Region Germline Gene Vh1-69 (57)

[0074] Exemplary anti-human immunoglobulin heavy chain variable region germline gene VH1-69 antibody include antibodies having a VH nucleotide sequence having SEQ ID NO: 1153 and a VL nucleotide sequence having SEQ ID NO: 1155; or a VH nucleotide sequence having SEQ ID NO: 1163 and a VL nucleotide sequence having SEQ ID NO:1155.

[0075] Exemplary anti-human immunoglobulin heavy chain variable region germline gene VH1-69 antibody include antibodies having a V_{H} amino acid sequence having SEQ ID NO: 1154 and a V_{L} amino acid sequence having SEQ ID NO: 1156; or a V_{H} amino acid sequence having SEQ ID NO: 1164 and a V_{L} amino acid sequence having SEQ ID NO: 1156.

[0076] In other embodiments the anti-human immunoglobulin heavy chain variable region germline gene VH1-69 antibody has a heavy chain with three CDRs including the amino acid sequences 1157, 1158, and 1159 and a light chain with three CDRs including the amino acid sequences 1160, 1161, and 1162 respectively.

### Influenza (49)

[0077] Exemplary anti-influenza antibody include antibodies having a VH nucleotide sequence having SEQ ID NO: 981 and a VL nucleotide sequence having SEQ ID NO: 983; a VH nucleotide sequence having SEQ ID NO: 985 and a VL nucleotide sequence having SEQ ID NO: 989; a VH nucleotide sequence having SEQ ID NO: 987 and a VL nucleotide sequence having SEQ ID NO: 991; a VH nucleotide sequence having SEQ ID NO: 993 and a VL nucleotide sequence having SEQ ID NO: 997; a VH nucleotide sequence having SEQ ID NO: 995 and a VK nucleotide sequence having SEQ ID NO: 999; a VH nucleotide sequence having SEQ ID NO: 1001 and a VL nucleotide sequence having SEQ ID NO: 1005; a VH nucleotide sequence having SEQ ID NO: 1003 and a VL nucleotide sequence having SEQ ID NO: 1007; a VH nucleotide sequence having SEQ ID NO: 1009 and a VL nucleotide sequence having SEQ ID NO: 1011; a VH nucleotide sequence having SEQ ID NO: 1013 and a VL nucleotide sequence having SEQ ID NO: 1015; and a VH nucleotide sequence having SEQ ID NO: 1017 and a VK nucleotide sequence having SEQ ID NO: 1019; a VH nucleotide sequence having SEQ ID NO: 1020 and a VL nucleotide sequence having SEQ ID NO: 1022.

[0078] Exemplary anti-influenza antibody include antibodies having a VH amino acid sequence having SEQ ID NO: 982 and a VL amino acid sequence having SEQ ID NO: 984; a VH amino acid sequence having SEQ ID NO: 986 and a VL amino acid sequence having SEQ ID NO: 988; a VH amino acid sequence having SEQ ID NO: 986 and a VL amino acid sequence having SEQ ID NO: 990; a VH amino acid sequence having SEQ ID NO: 992 and a VL amino acid sequence having SEQ ID NO: 994; a VH amino acid sequence having SEQ ID NO: 992 and a VK amino acid sequence having SEQ ID NO: 996; a VH amino acid sequence having SEQ ID NO: 998 and a VL amino acid sequence having SEQ ID NO: 1000; a VH amino acid sequence having SEQ ID NO: 998 and a VL amino acid sequence having SEQ ID NO: 1002; a VH amino acid sequence having SEQ ID NO: 1004 and a VL amino acid sequence having SEQ ID NO: 1006; a VH amino acid sequence having SEQ ID NO: 1008 and a VL amino acid sequence having SEQ ID NO: 1010; a VH amino acid sequence having SEQ ID NO: 1012 and a VK amino acid sequence having SEQ ID NO: 1014; and a VH amino acid sequence having SEQ ID NO: 1016 and a VL amino acid sequence having SEQ ID NO: 1018.

[0079] In other embodiments the anti-influenza antibody has a heavy chain with three CDRs including the amino acid sequences of 1023, 1031, and 1039 and a light chain with three CDRs including the amino acid sequences 1047, 1059, and 1071; a heavy chain with three CDRs including the amino acid sequences of 1023, 1032, and 1040 and a light chain with three CDRs including the amino acid sequences 1048, 1060, and 1072; a heavy chain with three CDRs including the amino acid sequences of 1025, 1032, and 1040 and a light chain with three CDRs including the amino acid sequences 1057, 1069, and 1081; a heavy chain with three CDRs including the amino acid sequences of 1026, 1033, and 1041 and a light chain with three CDRs including the amino acid sequences 1049, 1061, and 1073; a heavy chain with three CDRs including the amino acid sequences of 1026, 1033, and 1041 and a light chain with three CDRs including the amino acid sequences 1054, 1066, and 1078; a heavy chain with three CDRs including the amino acid sequences of 1027, 1034, and 1042 and a light chain with three CDRs including the amino acid sequences 1050, 1062, and 1074; a heavy chain with three CDRs including the amino acid sequences of 1027, 1034, and 1042 and a light chain with three CDRs including the amino acid sequences 1056, 1068, and 1080; a heavy chain with three CDRs including the amino acid sequences of 1028, 1035, and 1043 and a light chain with three CDRs including the amino acid sequences 1051, 1063, and 1065; a heavy chain with three CDRs including the amino acid sequences of 1028, 1036, and 1044 and a light chain with three CDRs including the amino acid sequences 1052, 1064, and 1076; a heavy chain with three CDRs including the amino acid sequences of 1029, 1037, and 1045 and a light chain with three CDRs including the amino acid sequences 1053, 1065, and 1077; or a heavy chain with three CDRs including the amino acid sequences of 1030, 1038, and 1046 and a light chain with three CDRs including the amino acid sequences 1058, 1070, and 1082.

### Influenza (78)

[0080] Exemplary anti-influenza antibodies include antibodies having containing a VH nucleotide sequence having SEQ ID NO: 397 and a VL nucleotide sequence having SEQ ID NO: 398; a VH nucleotide sequence having SEQ ID NO: 399 and a V_{L} nucleotide sequence having SEQ ID NO:400; a VH nucleotide sequence having SEQ ID NO: 401 and a V_{L} nucleotide sequence having SEQ ID NO: 402; a VH nucleotide sequence having SEQ ID NO: 403 and a VL nucleotide sequence having SEQ ID NO: 404; or a VH nucleotide sequence having SEQ ID NO: 405 and a VL nucleotide sequence having SEQ ID NO:406; or a VH nucleotide sequence having SEQ ID NO: 407 and a VL nucleotide sequence having SEQ ID NO:408; or a VH nucleotide sequence having SEQ ID NO: 409 and a VL nucleotide sequence having SEQ ID NO:410; or a VH nucleotide sequence having SEQ ID NO: 411 and a VL nucleotide sequence having SEQ ID NO:412; or a VH nucleotide sequence having SEQ ID NO: 413 and a VL nucleotide sequence having SEQ ID NO:414; or a VH nucleotide sequence having SEQ ID NO: 415 and a VL nucleotide sequence having SEQ ID NO:416; or a VH nucleotide sequence having SEQ ID NO: 417 and a VL nucleotide sequence having SEQ ID NO:418; or a VH nucleotide sequence having SEQ ID NO: 419 and a VL nucleotide sequence having SEQ ID NO:420; or a VH nucleotide sequence having SEQ ID NO: 421 and a VL nucleotide sequence having SEQ ID NO:422; or a VH nucleotide sequence having SEQ ID NO: 423 and a VL nucleotide sequence having SEQ ID NO:424; or a VH nucleotide sequence having SEQ ID NO: 425 and a VL nucleotide sequence having SEQ ID NO:426; or a VH nucleotide sequence having SEQ ID NO: 427 and a VL nucleotide sequence having SEQ ID NO:428; or a VH nucleotide sequence having SEQ ID NO: 429 and a VL nucleotide sequence having SEQ ID NO:430; or a VH nucleotide sequence having SEQ ID NO: 431 and a VL nucleotide sequence having SEQ ID NO:432; or a VH nucleotide sequence having SEQ ID NO: 433 and a VL nucleotide sequence having SEQ ID NO:434; or a VH nucleotide sequence having SEQ ID NO: 435 and a VL nucleotide sequence having SEQ ID NO:436; or a VH nucleotide sequence having SEQ ID NO: 437 and a VL nucleotide sequence having SEQ ID NO:438; or a VH nucleotide sequence having SEQ ID NO: 439 and a VL nucleotide sequence having SEQ ID NO:440; or a VH nucleotide sequence having SEQ ID NO: 441 and a VL nucleotide sequence having SEQ ID NO:442; ; or a VH nucleotide sequence having SEQ ID NO: 541 and a VL nucleotide sequence having SEQ ID NO: 542; or a VH nucleotide sequence having SEQ ID NO: 543 and a VL nucleotide sequence having SEQ ID NO: 544; or a VH nucleotide sequence having SEQ ID NO: 545 and a VL nucleotide sequence having SEQ ID NO: 546; or a VH nucleotide sequence having SEQ ID NO: 547 and a VL nucleotide sequence having SEQ ID NO: 548; or a VH nucleotide sequence having SEQ ID NO: 549 and a VL nucleotide sequence having SEQ ID NO: 550; or a VH nucleotide sequence having SEQ ID NO: 551 and a VL nucleotide sequence having SEQ ID NO: 552; or a VH nucleotide sequence having SEQ ID NO: 553 and a VL nucleotide sequence having SEQ ID NO: 554; or a VH nucleotide sequence having SEQ ID NO: 555 and a VL nucleotide sequence having SEQ ID NO: 556; or a VH nucleotide sequence having SEQ ID NO: 557 and a VL nucleotide sequence having SEQ ID NO: 558; or a VH nucleotide sequence having SEQ ID NO: 559 and a VL nucleotide sequence having SEQ ID NO: 560; or a VH nucleotide sequence having SEQ ID NO: 561 and a VL nucleotide sequence having SEQ ID NO: 562; or a VH nucleotide sequence having SEQ ID NO: 563 and a VL nucleotide sequence having SEQ ID NO: 564; or a VH nucleotide sequence having SEQ ID NO: 565 and a VL nucleotide sequence having SEQ ID NO: 566; or a VH nucleotide sequence having SEQ ID NO: 567 and a VL nucleotide sequence having SEQ ID NO: 568; or a VH nucleotide sequence having SEQ ID NO: 569 and a VL nucleotide sequence having SEQ ID NO: 570; or a VH nucleotide sequence having SEQ ID NO: 571 and a VL nucleotide sequence having SEQ ID NO: 572; or a VH nucleotide sequence having SEQ ID NO: 573 and a VL nucleotide sequence having SEQ ID NO: 574; or a VH nucleotide sequence having SEQ ID NO: 575 and a VL nucleotide sequence having SEQ ID NO: 576; or a VH nucleotide sequence having SEQ ID NO: 577 and a VL nucleotide sequence having SEQ ID NO: 578; or a VH nucleotide sequence having SEQ ID NO: 579 and a VL nucleotide sequence having SEQ ID NO: 580; or a VH nucleotide sequence having SEQ ID NO: 581 and a VL nucleotide sequence having SEQ ID NO: 582; or a VH nucleotide sequence having SEQ ID NO: 583 and a VL nucleotide sequence having SEQ ID NO: 584; or a VH nucleotide sequence having SEQ ID NO: 585 and a VL nucleotide sequence having SEQ ID NO: 586; or a VH nucleotide sequence having SEQ ID NO: 587 and a VL nucleotide sequence having SEQ ID NO: 588; or a VH nucleotide sequence having SEQ ID NO: 589 and a VL nucleotide sequence having SEQ ID NO: 590; or a VH nucleotide sequence having SEQ ID NO: 591 and a VL nucleotide sequence having SEQ ID NO: 592; or a VH nucleotide sequence having SEQ ID NO: 593 and a VL nucleotide sequence having SEQ ID NO: 594; or a VH nucleotide sequence having SEQ ID NO: 595 and a VL nucleotide sequence having SEQ ID NO: 596; or a VH nucleotide sequence having SEQ ID NO: 597 and a VL nucleotide sequence having SEQ ID NO: 598; or a VH nucleotide sequence having SEQ ID NO: 599 and a VL nucleotide sequence having SEQ ID NO: 600.

[0081] Exemplary anti-influenza antibodies antibody include antibodies having containing a VH amino acid sequence having SEQ ID NO: 469 and a VL amino acid sequence having SEQ ID NO: 470; a VH amino acid having SEQ ID NO: 471 and a V_{L} polypeptide sequence having SEQ ID NO:472; a VH amino acid sequence having SEQ ID NO: 473 and a V_{L} amino acid sequence having SEQ ID NO: 474; a VH amino acid sequence having SEQ ID NO: 475 and a VL amino acid sequence having SEQ ID NO: 476; or a VH nucleotide sequence having SEQ ID NO: 477 and a VL nucleotide sequence having SEQ ID NO:478; a VH amino acid sequence having SEQ ID NO: 479 and a VL amino acid sequence having SEQ ID NO: 480; a VH amino acid sequence having SEQ ID NO: 481 and a VL amino acid sequence having SEQ ID NO: 482; a VH amino acid sequence having SEQ ID NO: 483 and a VL amino acid sequence having SEQ ID NO: 484; a VH amino acid sequence having SEQ ID NO: 485 and a VL amino acid sequence having SEQ ID NO: 486; a VH amino acid sequence having SEQ ID NO: 487 and a VL amino acid sequence having SEQ ID NO: 488; a VH amino acid sequence having SEQ ID NO: 489 and a VL amino acid sequence having SEQ ID NO: 490; a VH amino acid sequence having SEQ ID NO: 491 and a VL amino acid sequence having SEQ ID NO: 492; a VH amino acid sequence having SEQ ID NO: 493 and a VL amino acid sequence having SEQ ID NO: 494; a VH amino acid sequence having SEQ ID NO: 495 and a VL amino acid sequence having SEQ ID NO: 496; a VH amino acid sequence having SEQ ID NO: 497 and a VL amino acid sequence having SEQ ID NO: 498; a VH amino acid sequence having SEQ ID NO: 499 and a VL amino acid sequence having SEQ ID NO: 500; a VH amino acid sequence having SEQ ID NO: 501 and a VL amino acid sequence having SEQ ID NO: 502; a VH amino acid sequence having SEQ ID NO: 503 and a VL amino acid sequence having SEQ ID NO: 504; a VH amino acid sequence having SEQ ID NO: 505 and a VL amino acid sequence having SEQ ID NO: 506; a VH amino acid sequence having SEQ ID NO: 507 and a VL amino acid sequence having SEQ ID NO: 508; a VH amino acid sequence having SEQ ID NO: 509 and a VL amino acid sequence having SEQ ID NO: 510; a VH amino acid sequence having SEQ ID NO: 511 and a VL amino acid sequence having SEQ ID NO: 512; a VH amino acid sequence having SEQ ID NO: 513 and a VL amino acid sequence having SEQ ID NO: 514; a VH amino acid sequence having SEQ ID NO: 515 and a VL amino acid sequence having SEQ ID NO: 516; a VH amino acid sequence having SEQ ID NO: 517 and a VL amino acid sequence having SEQ ID NO: 518; a VH amino acid sequence having SEQ ID NO: 519 and a VL amino acid sequence having SEQ ID NO: 520; a VH amino acid sequence having SEQ ID NO: 521 and a VL amino acid sequence having SEQ ID NO: 522; a VH amino acid sequence having SEQ ID NO: 523 and a VL amino acid sequence having SEQ ID NO: 524; a VH amino acid sequence having SEQ ID NO: 525 and a VL amino acid sequence having SEQ ID NO: 526; a VH amino acid sequence having SEQ ID NO: 527 and a VL amino acid sequence having SEQ ID NO: 528; a VH amino acid sequence having SEQ ID NO: 529 and a VL amino acid sequence having SEQ ID NO: 530; a VH amino acid sequence having SEQ ID NO: 531 and a VL amino acid sequence having SEQ ID NO: 532; a VH amino acid sequence having SEQ ID NO: 533 and a VL amino acid sequence having SEQ ID NO: 534; a VH amino acid sequence having SEQ ID NO: 535 and a VL amino acid sequence having SEQ ID NO: 536; a VH amino acid sequence having SEQ ID NO: 537 and a VL amino acid sequence having SEQ ID NO: 538; a VH amino acid sequence having SEQ ID NO: 539 and a VL amino acid sequence having SEQ ID NO: 540 a VH amino acid sequence having SEQ ID NO: 601 and a VL amino acid sequence having SEQ ID NO: 602 a VH amino acid sequence having SEQ ID NO: 603 and a VL amino acid sequence having SEQ ID NO: 604 a VH amino acid sequence having SEQ ID NO: 605 and a VL amino acid sequence having SEQ ID NO: 606 a VH amino acid sequence having SEQ ID NO: 607 and a VL amino acid sequence having SEQ ID NO: 608 a VH amino acid sequence having SEQ ID NO: 609 and a VL amino acid sequence having SEQ ID NO: 610 a VH amino acid sequence having SEQ ID NO: 611 and a VL amino acid sequence having SEQ ID NO: 612 a VH amino acid sequence having SEQ ID NO: 613 and a VL amino acid sequence having SEQ ID NO: 614 a VH amino acid sequence having SEQ ID NO: 615 and a VL amino acid sequence having SEQ ID NO: 616 a VH amino acid sequence having SEQ ID NO: 617 and a VL amino acid sequence having SEQ ID NO: 618 a VH amino acid sequence having SEQ ID NO: 619 and a VL amino acid sequence having SEQ ID NO: 620 a VH amino acid sequence having SEQ ID NO: 621 and a VL amino acid sequence having SEQ ID NO: 622 a VH amino acid sequence having SEQ ID NO: 623 and a VL amino acid sequence having SEQ ID NO: 624 a VH amino acid sequence having SEQ ID NO: 625 and a VL amino acid sequence having SEQ ID NO: 626 a VH amino acid sequence having SEQ ID NO: 627 and a VL amino acid sequence having SEQ ID NO: 628 a VH amino acid sequence having SEQ ID NO: 629 and a VL amino acid sequence having SEQ ID NO: 630 a VH amino acid sequence having SEQ ID NO: 631 and a VL amino acid sequence having SEQ ID NO: 632 a VH amino acid sequence having SEQ ID NO: 633 and a VL amino acid sequence having SEQ ID NO: 634 a VH amino acid sequence having SEQ ID NO: 635 and a VL amino acid sequence having SEQ ID NO: 636 a VH amino acid sequence having SEQ ID NO: 637 and a VL amino acid sequence having SEQ ID NO: 638 a VH amino acid sequence having SEQ ID NO: 639 and a VL amino acid sequence having SEQ ID NO: 640 a VH amino acid sequence having SEQ ID NO: 641 and a VL amino acid sequence having SEQ ID NO: 642 a VH amino acid sequence having SEQ ID NO: 643 and a VL amino acid sequence having SEQ ID NO: 644 a VH amino acid sequence having SEQ ID NO: 645 and a VL amino acid sequence having SEQ ID NO: 646 a VH amino acid sequence having SEQ ID NO: 647 and a VL amino acid sequence having SEQ ID NO: 648 a VH amino acid sequence having SEQ ID NO: 649 and a VL amino acid sequence having SEQ ID NO: 650 a VH amino acid sequence having SEQ ID NO: 651 and a VL amino acid sequence having SEQ ID NO: 652 a VH amino acid sequence having SEQ ID NO: 653 and a VL amino acid sequence having SEQ ID NO: 654 a VH amino acid sequence having SEQ ID NO: 655 and a VL amino acid sequence having SEQ ID NO: 656 a VH amino acid sequence having SEQ ID NO: 657 and a VL amino acid sequence having SEQ ID NO: 658 a VH amino acid sequence having SEQ ID NO: 659 and a VL amino acid sequence having SEQ ID NO: 660.

[0082] In other embodiments the anti-influenza antibodies antibody has a heavy chain with three CDRs including the amino acid sequences SEQ ID NO: 1, 37, 73 respectively and a light chain with three CDRs including the amino acid sequences 109, 145, 181 respectively; or a heavy chain with three CDRs comprising the amino acid sequences 2, 38, 74 respectively and a light chain with three CDRs comprising the amino acid sequences 110, 146, 182, respectively; or a heavy chain with three CDRs comprising the amino acid sequences 3, 39, 75 respectively and a light chain with three CDRs comprising the amino acid sequences 111, 147, 183, respectively; or a heavy chain with three CDRs comprising the amino acid sequences 4, 40, 76 respectively and a light chain with three CDRs comprising the amino acid sequences 112, 148, 184, respectively; or a heavy chain with three CDRs comprising the amino acid sequences 5, 41, 77 respectively and a light chain with three CDRs comprising the amino acid sequences 113, 149, 185, respectively; or a heavy chain with three CDRs comprising the amino acid sequences 6, 42, 78 respectively and a light chain with three CDRs comprising the amino acid sequences 114, 150, 186, respectively; or a heavy chain with three CDRs comprising the amino acid sequences 7, 43, 79 respectively and a light chain with three CDRs comprising the amino acid sequences 115, 151, 187, respectively; or a heavy chain with three CDRs comprising the amino acid sequences 8, 44, 80 respectively and a light chain with three CDRs comprising the amino acid sequences 116, 152, 188, respectively; or a heavy chain with three CDRs comprising the amino acid sequences 9, 45, 81 respectively and a light chain with three CDRs comprising the amino acid sequences 117, 153, 189, respectively; or a heavy chain with three CDRs comprising the amino acid sequences 10, 46, 82 respectively and a light chain with three CDRs comprising the amino acid sequences 118, 154, 190, respectively; or a heavy chain with three CDRs comprising the amino acid sequences 11, 47, 83 respectively and a light chain with three CDRs comprising the amino acid sequences 119, 155, 191, respectively; or a heavy chain with three CDRs comprising the amino acid sequences 12, 48, 84 respectively and a light chain with three CDRs comprising the amino acid sequences 120, 156, 192, respectively; or a heavy chain with three CDRs comprising the amino acid sequences 13, 49, 85 respectively and a light chain with three CDRs comprising the amino acid sequences 121, 157, 193, respectively; or a heavy chain with three CDRs comprising the amino acid sequences 14, 50, 86 respectively and a light chain with three CDRs comprising the amino acid sequences 122, 158, 194, respectively; or a heavy chain with three CDRs comprising the amino acid sequences 15, 51, 87 respectively and a light chain with three CDRs comprising the amino acid sequences 123, 159, 195, respectively; or a heavy chain with three CDRs comprising the amino acid sequences 16, 52, 88 respectively and a light chain with three CDRs comprising the amino acid sequences 124, 160, 196, respectively; ; or a heavy chain with three CDRs comprising the amino acid sequences 17, 53, 89 respectively and a light chain with three CDRs comprising the amino acid sequences 125, 161, 197, respectively; or a heavy chain with three CDRs comprising the amino acid sequences 18, 54, 90 respectively and a light chain with three CDRs comprising the amino acid sequences 126, 162, 198, respectively; or a heavy chain with three CDRs comprising the amino acid sequences 19, 55, 91 respectively and a light chain with three CDRs comprising the amino acid sequences 127, 163, 199, respectively; or a heavy chain with three CDRs comprising the amino acid sequences 20, 56, 92 respectively and a light chain with three CDRs comprising the amino acid sequences 128, 164, 200, respectively; or a heavy chain with three CDRs comprising the amino acid sequences 21, 57, 93 respectively and a light chain with three CDRs comprising the amino acid sequences 129, 165, 201, respectively; or a heavy chain with three CDRs comprising the amino acid sequences 22, 58, 94 respectively and a light chain with three CDRs comprising the amino acid sequences 130, 166, 202, respectively; or a heavy chain with three CDRs comprising the amino acid sequences 23, 59, 95 respectively and a light chain with three CDRs comprising the amino acid sequences 131, 167, 203, respectively; or a heavy chain with three CDRs comprising the amino acid sequences 24, 60, 96 respectively and a light chain with three CDRs comprising the amino acid sequences 132, 168, 204, respectively; or a heavy chain with three CDRs comprising the amino acid sequences 25, 61, 95 respectively and a light chain with three CDRs comprising the amino acid sequences 133, 169, 205, respectively; or a heavy chain with three CDRs comprising the amino acid sequences 26, 62, 96 respectively and a light chain with three CDRs comprising the amino acid sequences 134, 170, 206, respectively; or a heavy chain with three CDRs comprising the amino acid sequences 27, 63, 97 respectively and a light chain with three CDRs comprising the amino acid sequences 135, 171, 207, respectively; or a heavy chain with three CDRs comprising the amino acid sequences 28, 64, 98 respectively and a light chain with three CDRs comprising the amino acid sequences 136, 172, 208, respectively; or a heavy chain with three CDRs comprising the amino acid sequences 29, 65, 99 respectively and a light chain with three CDRs comprising the amino acid sequences 137, 173, 209, respectively; or a heavy chain with three CDRs comprising the amino acid sequences 30, 66, 100 respectively and a light chain with three CDRs comprising the amino acid sequences 138, 174, 210, respectively; or a heavy chain with three CDRs comprising the amino acid sequences 31, 67, 101 respectively and a light chain with three CDRs comprising the amino acid sequences 139, 175, 211, respectively; or a heavy chain with three CDRs comprising the amino acid sequences 32, 68, 102 respectively and a light chain with three CDRs comprising the amino acid sequences 140, 176, 212, respectively; or a heavy chain with three CDRs comprising the amino acid sequences 33, 69, 103 respectively and a light chain with three CDRs comprising the amino acid sequences 141, 177, 213, respectively; or a heavy chain with three CDRs comprising the amino acid sequences 34, 70, 104 respectively and a light chain with three CDRs comprising the amino acid sequences 142, 178, 214, respectively; or a heavy chain with three CDRs comprising the amino acid sequences 35, 71, 105 respectively and a light chain with three CDRs comprising the amino acid sequences 143, 179, 215, respectively; or a heavy chain with three CDRs comprising the amino acid sequences 36, 72, 106 respectively and a light chain with three CDRs comprising the amino acid sequences 144, 180, 216, respectively; or a heavy chain with three CDRs comprising the amino acid sequences 217, 247, 277 respectively and a light chain with three CDRs comprising the amino acid sequences 307, 337, 367, respectively; or a heavy chain with three CDRs comprising the amino acid sequences 218, 248, 278 respectively and a light chain with three CDRs comprising the amino acid sequences 308, 338, 368, respectively; ; or a heavy chain with three CDRs comprising the amino acid sequences 219, 249, 279 respectively and a light chain with three CDRs comprising the amino acid sequences 309, 339, 369, respectively; or a heavy chain with three CDRs comprising the amino acid sequences 220, 250, 280 respectively and a light chain with three CDRs comprising the amino acid sequences 310, 340, 370, respectively; or a heavy chain with three CDRs comprising the amino acid sequences 221, 251, 281 respectively and a light chain with three CDRs comprising the amino acid sequences 311, 341, 371, respectively; or a heavy chain with three CDRs comprising the amino acid sequences 222, 252, 282 respectively and a light chain with three CDRs comprising the amino acid sequences 312, 342, 372, respectively; or a heavy chain with three CDRs comprising the amino acid sequences 223, 253, 283 respectively and a light chain with three CDRs comprising the amino acid sequences 313, 343, 373, respectively; or a heavy chain with three CDRs comprising the amino acid sequences 224, 254, 284 respectively and a light chain with three CDRs comprising the amino acid sequences 314, 344, 374, respectively; or a heavy chain with three CDRs comprising the amino acid sequences 225, 255, 285 respectively and a light chain with three CDRs comprising the amino acid sequences 315, 345, 375, respectively; or a heavy chain with three CDRs comprising the amino acid sequences 226, 256, 286 respectively and a light chain with three CDRs comprising the amino acid sequences 316, 346, 376, respectively; or a heavy chain with three CDRs comprising the amino acid sequences 227, 257, 287 respectively and a light chain with three CDRs comprising the amino acid sequences 317, 347, 377, respectively; or a heavy chain with three CDRs comprising the amino acid sequences 228, 258, 288 respectively and a light chain with three CDRs comprising the amino acid sequences 318, 348, 378, respectively; or a heavy chain with three CDRs comprising the amino acid sequences 229, 259, 289 respectively and a light chain with three CDRs comprising the amino acid sequences 319, 349, 379, respectively; or a heavy chain with three CDRs comprising the amino acid sequences 230, 260, 290 respectively and a light chain with three CDRs comprising the amino acid sequences 320, 350, 380, respectively; or a heavy chain with three CDRs comprising the amino acid sequences 231, 261, 291 respectively and a light chain with three CDRs comprising the amino acid sequences 321, 351, 381, respectively; or a heavy chain with three CDRs comprising the amino acid sequences 232, 262, 292 respectively and a light chain with three CDRs comprising the amino acid sequences 322, 352, 382, respectively; or a heavy chain with three CDRs comprising the amino acid sequences 233, 263, 293 respectively and a light chain with three CDRs comprising the amino acid sequences 323, 353, 383, respectively; or a heavy chain with three CDRs comprising the amino acid sequences 234, 273, 294 respectively and a light chain with three CDRs comprising the amino acid sequences 324, 354, 384, respectively; or a heavy chain with three CDRs comprising the amino acid sequences 235, 274, 295 respectively and a light chain with three CDRs comprising the amino acid sequences 325, 355, 385, respectively; or a heavy chain with three CDRs comprising the amino acid sequences 236, 275, 296 respectively and a light chain with three CDRs comprising the amino acid sequences 326, 356, 386, respectively; or a heavy chain with three CDRs comprising the amino acid sequences 237, 276, 297 respectively and a light chain with three CDRs comprising the amino acid sequences 327, 357, 387, respectively; or a heavy chain with three CDRs comprising the amino acid sequences 237, 277, 298 respectively and a light chain with three CDRs comprising the amino acid sequences 328, 358, 388, respectively; or a heavy chain with three CDRs comprising the amino acid sequences 238, 278, 299 respectively and a light chain with three CDRs comprising the amino acid sequences 329, 359, 389, respectively; or a heavy chain with three CDRs comprising the amino acid sequences 239, 279, 300 respectively and a light chain with three CDRs comprising the amino acid sequences 330, 360, 390, respectively; or a heavy chain with three CDRs comprising the amino acid sequences 240, 280, 301 respectively and a light chain with three CDRs comprising the amino acid sequences 331, 361, 391, respectively; or a heavy chain with three CDRs comprising the amino acid sequences 241, 281, 302 respectively and a light chain with three CDRs comprising the amino acid sequences 332, 362, 392, respectively; or a heavy chain with three CDRs comprising the amino acid sequences 242, 282, 303 respectively and a light chain with three CDRs comprising the amino acid sequences 333, 363, 393, respectively; or a heavy chain with three CDRs comprising the amino acid sequences 243, 283, 304 respectively and a light chain with three CDRs comprising the amino acid sequences 334, 364, 394, respectively; or a heavy chain with three CDRs comprising the amino acid sequences 244, 284, 305 respectively and a light chain with three CDRs comprising the amino acid sequences 335, 365, 395, respectively; or a heavy chain with three CDRs comprising the amino acid sequences 245, 285, 306 respectively and a light chain with three CDRs comprising the amino acid sequences 336, 366, 396, respectively.

[0083] Other anti-influenza antibodies include those having the amino acid or nucleic acid sequences shown in the below Table 1.

Table 1A. Antibody 3I14Variable Region nucleic acid sequences
V_{H} chain of 3I14
(SEQ ID NO: 1665)
CAGGTGCAGCTGTTGGAGTCTGGGGGAGGCGTGGTCCAGCCTGGGAGGTCCCTGAGACTCTCCTGT
GCAGCCTCTGGATTCACCTTCAGTAACTATGGCATGCACTGGGTCCGCCAGGCTCCAGGCAAGGGG
CTGGAGTGGGTGGCAATTATATCATTTGATGGAAGTAAAAAATATTATGCAAACTCCGTGAAGGGC
CGATCCACCATCTCCAGAGACAATTCCAAGAACACGCTGTCTCTGCAAATGAACAGCCTGGGACCT
GAGGACACGGCTCTATATTACTGTGCGAAACTGCCCTCCCCGTATTACTTTGATAGTCGGTTCGTG
TGGGTCGCCGCCAGCGCATTTCACTTCTGGGGCCAGGGAATCCTGGTCACCGTCTCTTCA
V_{L} chain of 3I14
(SEQ ID NO: 1667)
AATTTTATGCTGACTCAGCCACCCTCAGCGTCTGGGACCCCCGGGCAGAGGGTCACCATCTCTTGC
TCTGGAAGCAGCTCCAACATCGGAGGTAATACTGTACACTGGTTCCAGCAGCTCCCAGGAACGGCC
CCCAAACTCCTCATCTATACTAATAGTCTGCGGCCCTCAGGGGTCCCTGACCGATTCTCTGGCTCC
AAGTCTGGCACCTCAGCCTCCCTGGCCATCAGTGGGCTCCAGTCTGAGGATGAGGCTGATTATTAC
TGTGCAGCATGGGATGACAGCCTAAATGGTCAGGTGTTCGGCGGAGGGACCAAGCTGACCGTCCTA
Table 1B. Antibody3I14 Variable Region amino acid sequences
V_{H} chain of 3I14
(SEQ ID NO: 1666)
QVQLLESGGGVVQPGRSLRLSCAASGFTFSNYGMHWVRQAPGKGLEWVAIISEDGSKKYY
ANSVKGRSTISRDNSKNTLSLQMNSLGPEDTALYYCAKLPSPYYFDSRFVWVAASAFHFW
GQGILVTVSS
V_{L} chain of 3114
(SEQ ID NO: 1668)
NFMLTQPPSASGTPGQRVTISCSGSSSNIGGNTVHWFQQLPGTAPKLLIYTNSLRPSGVPD
RFSGSKSGTSASLAISGLQSEDEADYYCAAWDDSLNGQVFGGGTKLTVL
Table 1C. Antibody 3I14V_{L}D94N Variable Region nucleic acid sequence
V_{L} chain of 3I14V_{L}D94N
(SEQ ID NO: 1669)
AATTTTATGCTGACTCAGCCACCCTCAGCGTCTGGGACCCCCGGGCAGAGGGTCACCATCTCTTGC
TCTGGAAGCAGCTCCAACATCGGAGGTAATACTGTACACTGGTTCCAGCAGCTCCCAGGAACGGCC
CCCAAACTCCTCATCTATACTAATAGTCTGCGGCCCTCAGGGGTCCCTGACCGATTCTCTGGCTCC
AAGTCTGGCACCTCAGCCTCCCTGGCCATCAGTGGGCTCCAGTCTGAGGATGAGGCTGATTATTAC
TGTGCAGCATGGGATAACAGCCTAAATGGTCAGGTGTTCGGCGGAGGGACCAAGCTGACCGTCCTA
Table 1C. Antibody 3I14V_{L}D94N Variable Region amino acid sequence
V_{L} chain of 3I14V_{L}D94N
(SEQ ID NO: 1670)
NFMLTQPPSASGTPGQRVTISCSGSSSNIGGNTVHWFQQLPGTAPKLLIYTNSLRPSGVPD
RFSGSKSGTSASLAISGLQSEDEADYYCAAWDNSLNGQVFGGGTKLTVL

[0084] The amino acid sequences of the heavy and light chain complementary determining regions of the 3I14 and 3I14V_{L}D94N neutralizing influenza antibodies are shown in the below Table 2

TABLE 2

| | | |
|---|---|---|
| HCDR1 | GFTFSNYG | (SEQ ID NO: 1671) |
| HCDR2 | ISFDGSKK | (SEQ ID NO: 1672) |
| HCDR3 | CAKLPSPYYFDSRFVWVA | (SEQ ID NO: 1673) |
| | ASAFHFW | |
| LCDR1 | SSNIGGNT | (SEQ ID NO: 1674) |
| LCDR2 | TNS | (SEQ ID NO: 1675) |
| LCDR3 | CAAWDDSLNGQVF | (SEQ ID NO: 1676) |
| 3I14V_{L}D94N | CAAWDNSLNGQVF | (SEQ ID NO: 1677) |
| LCDR3 | | |

[0085] Other binding domain than scFv can also be used for predefined targeting of lymphocytes, such as camelid single-domain antibody fragments or receptor ligands, antibody binding domains, antibody hypervariable loops or CDRs as non limiting examples.

[0086] In a preferred embodiment said transmembrane domain further comprises a stalk region between said extracellular ligand-binding domain and said transmembrane domain. The term “stalk region” used herein generally means any oligo- or polypeptide that functions to link the transmembrane domain to the extracellular ligand-binding domain. In particular, stalk region are used to provide more flexibility and accessibility for the extracellular ligand-binding domain. A stalk region may comprise up to 300 amino acids, preferably 10 to 100 amino acids and most preferably 25 to 50 amino acids. Stalk region may be derived from all or part of naturally occurring molecules, such as from all or part of the extracellular region of CD8, CD4 or CD28, or from all or part of an antibody constant region. Alternatively the stalk region may be a synthetic sequence that corresponds to a naturally occurring stalk sequence, or may be an entirely synthetic stalk sequence. In a preferred embodiment said stalk region is a part of human CD8 alpha chain

[0087] The signal transducing domain or intracellular signaling domain of the CAR of the invention is responsible for intracellular signaling following the binding of extracellular ligand binding domain to the target resulting in the activation of the immune cell and immune response. In other words, the signal transducing domain is responsible for the activation of at least one of the normal effector functions of the immune cell in which the CAR is expressed. For example, the effector function of a T cell can be a cytolytic activity or helper activity including the secretion of cytokines. Thus, the term “signal transducing domain” refers to the portion of a protein which transduces the effector signal function signal and directs the cell to perform a specialized function.

[0088] Signal transduction domain comprises two distinct classes of cytoplasmic signaling sequence, those that initiate antigen-dependent primary activation, and those that act in an antigen-independent manner to provide a secondary or co-stimulatory signal. Primary cytoplasmic signaling sequence can comprise signaling motifs which are known as immunoreceptor tyrosine-based activation motifs of ITAMs. ITAMs are well defined signaling motifs found in the intracytoplasmic tail of a variety of receptors that serve as binding sites for syk/zap70 class tyrosine kinases. Examples of ITAM used in the invention can include as non limiting examples those derived from TCR zeta, FcR gamma, FcR beta, FcR epsilon, CD3 gamma, CD3 delta, CD3 epsilon, CD5, CD22, CD79a, CD79b and CD66d. In a preferred embodiment, the signaling transducing domain of the CAR can comprise the CD3 zeta signaling domain, or the intracytoplasmic domain of the Fc epsilon RI beta or gamma chains. In another preferred embodiment, the signaling is provided by CD3 zeta together with co-stimulation provided by CD28 and a tumor necrosis factor receptor (TNFr), such as 4-1BB or OX40), for example.

[0089] In particular embodiment the intracellular signaling domain of the CAR of the present invention comprises a co-stimulatory signal molecule. In some embodiments the intracellular signaling domain contains 2, 3, 4 or more co-stimulatory molecules in tandem. A co-stimulatory molecule is a cell surface molecule other than an antigen receptor or their ligands that is required for an efficient immune response.

[0090] “Co-stimulatory ligand” refers to a molecule on an antigen presenting cell that specifically binds a cognate co-stimulatory molecule on a T-cell, thereby providing a signal which, in addition to the primary signal provided by, for instance, binding of a TCR/CD3 complex with an MHC molecule loaded with peptide, mediates a T cell response, including, but not limited to, proliferation activation, differentiation and the like. A co-stimulatory ligand can include but is not limited to CD7, B7-1 (CD80), B7-2 (CD86), PD-L1, PD-L2, 4-1BBL, OX40L, inducible costimulatory ligand (ICOS-L), intercellular adhesion molecule (ICAM, CD30L, CD40, CD70, CD83, HLA-G, MICA, M1CB, HVEM, lymphotoxin beta receptor, 3/TR6, ILT3, ILT4, an agonist or antibody that binds Toll ligand receptor and a ligand that specifically binds with B7-H3. A co-stimulatory ligand also encompasses, inter alia, an antibody that specifically binds with a co-stimulatory molecule present on a T cell, such as but not limited to, CD27, CD28, 4-IBB, OX40, CD30, CD40, PD-1, ICOS, lymphocyte function-associated antigen-1 (LFA-1), CD2, CD7, LTGHT, NKG2C, B7-H3, a ligand that specifically binds with CD83.

[0091] A “co-stimulatory molecule” refers to the cognate binding partner on a T-cell that specifically binds with a co-stimulatory ligand, thereby mediating a co-stimulatory response by the cell, such as, but not limited to proliferation. Co-stimulatory molecules include, but are not limited to an MHC class 1 molecule, BTLA and Toll ligand receptor. Examples of costimulatory molecules include CD27, CD28, CD8, 4-1BB (CD137), OX40, CD30, CD40, PD-1, ICOS, lymphocyte function-associated antigen-1 (LFA-1), CD2, CD7, LIGHT, NKG2C, B7-H3 and a ligand that specifically binds with CD83 and the like. The In another particular embodiment, said signal transducing domain is a TNFR-associated Factor 2 (TRAF2) binding motifs, intracytoplasmic tail of costimulatory TNFR member family. Cytoplasmic tail of costimulatory TNFR family member contains TRAF2 binding motifs consisting of the major conserved motif (P/S/A)X(Q/E)E) or the minor motif (PXQXXD), wherein X is any amino acid. TRAF proteins are recruited to the intracellular tails of many TNFRs in response to receptor trimerization.

[0092] The distinguishing features of appropriate transmembrane polypeptides comprise the ability to be expressed at the surface of an immune cell, in particular lymphocyte cells or Natural killer (NK) cells, and to interact together for directing cellular response of immune cell against a predefined target cell. The different transmembrane polypeptides of the CAR of the present invention comprising an extracellular ligand-biding domain and/or a signal transducing domain interact together to take part in signal transduction following the binding with a target ligand and induce an immune response. The transmembrane domain can be derived either from a natural or from a synthetic source. The transmembrane domain can be derived from any membrane-bound or transmembrane protein.

[0093] The term “a part of” used herein refers to any subset of the molecule, that is a shorter peptide. Alternatively, amino acid sequence functional variants of the polypeptide can be prepared by mutations in the DNA which encodes the polypeptide. Such variants or functional variants include, for example, deletions from, or insertions or substitutions of, residues within the amino acid sequence. Any combination of deletion, insertion, and substitution may also be made to arrive at the final construct, provided that the final construct possesses the desired activity, especially to exhibit a specific anti-target cellular immune activity. The functionality of the CAR of the invention within a host cell is detectable in an assay suitable for demonstrating the signaling potential of said CAR upon binding of a particular target. Such assays are available to the skilled person in the art. For example, this assay allows the detection of a signaling pathway, triggered upon binding of the target, such as an assay involving measurement of the increase of calcium ion release, intracellular tyrosine phosphorylation, inositol phosphate turnover, or interleukin (IL) 2, interferon .gamma., GM-CSF, IL-3, IL-4 production thus effected.

### Cells

[0094] Embodiments of the invention include cells that express a CAR (i.e, CARTS). The cell may be of any kind, including an immune cell capable of expressing the CAR for cancer therapy or a cell, such as a bacterial cell, that harbors an expression vector that encodes the CAR. As used herein, the terms “cell,” “cell line,” and “cell culture” may be used interchangeably. All of these terms also include their progeny, which is any and all subsequent generations. It is understood that all progeny may not be identical due to deliberate or inadvertent mutations. In the context of expressing a heterologous nucleic acid sequence, “host cell” refers to a eukaryotic cell that is capable of replicating a vector and/or expressing a heterologous gene encoded by a vector. A host cell can, and has been, used as a recipient for vectors. A host cell may be “transfected” or “transformed,” which refers to a process by which exogenous nucleic acid is transferred or introduced into the host cell. A transformed cell includes the primary subject cell and its progeny. As used herein, the terms “engineered” and “recombinant” cells or host cells are intended to refer to a cell into which an exogenous nucleic acid sequence, such as, for example, a vector, has been introduced. Therefore, recombinant cells are distinguishable from naturally occurring cells which do not contain a recombinantly introduced nucleic acid. In embodiments of the invention, a host cell is a T cell, including a cytotoxic T cell (also known as TC, Cytotoxic T Lymphocyte, CTL, T-Killer cell, cytolytic T cell, CD8+ T-cells or killer T cell); NK cells and NKT cells are also encompassed in the invention.

[0095] Some vectors may employ control sequences that allow it to be replicated and/or expressed in both prokaryotic and eukaryotic cells. One of skill in the art would further understand the conditions under which to incubate all of the above described host cells to maintain them and to permit replication of a vector. Also understood and known are techniques and conditions that would allow large-scale production of vectors, as well as production of the nucleic acids encoded by vectors and their cognate polypeptides, proteins, or peptides.

[0096] The cells can be autologous cells, syngeneic cells, allogenic cells and even in some cases, xenogeneic cells.

[0097] In many situations one may wish to be able to kill the modified CTLs, where one wishes to terminate the treatment, the cells become neoplastic, in research where the absence of the cells after their presence is of interest, or other event. For this purpose one can provide for the expression of certain gene products in which one can kill the modified cells under controlled conditions, such as inducible suicide genes.

### Armed CARTS

[0098] The invention further includes CARTS that are modified to secrete one or more polypeptides. The polypeptide can be for example an antibody or cytokine. Preferably, the antibody is specific for CAIX, GITR, PD-L1, PD-L2. PD-1, or CCR4

[0099] Armed CARTS have the advantage of simultaneously secreting a polypeptide at the targeted site, e.g. tumor site.

[0100] Armed CART can be constructed by including a nucleic acid encoding the polypeptide of interest after the intracellular signaling domain. Preferably, there is an internal ribosome entry site, (IRES), positioned between the intracellular signaling domain and the polypeptide of interest. One skilled in the art can appreciate that more than one polypeptide can be expressed by employing multiple IRES sequences in tandem.

[0101] In one embodiment, the methods and compositions presented herein provide a target-specific Anti-CAIX CAR T cell of second generation armed with the power to secrete anti-PD-L1 IgGs in the RCC milieu to combat T cell exhaustion. The human Anti-CAIX CAR containing the CD28 co-stimulatory domain was chosen based in its killing activity and low immunogenicity in human cRCC xenografts in mice. The Anti-CAIX CART cells-secreting Anti-PD-L1 IgG1 or IgG4 was extensively compared with an unrelated Anti-BCMA CAR or with an Anti-CAIX CAR, both secreting an irrelevant Anti-SARS IgG1. We have demonstrated stable expression of the CARs and high proliferation of all CART cells. Anti-CAIX CART cells have capacity to undergo clonal expansion when in contact with CAIX+ RCC cells, and were also activated, releasing high levels of IFN and IL-2, which could improve tumor suppression. These Anti-CAIX CART cells are also able to secrete high levels of Anti-PD-L1 IgG1 or IgG4 and these antibodies can interact specifically with PD-L1, inducing downregulation of the exhaustion markers PD-1, Tim-3 and Lag-3 in vitro and in vivo. These results have shown that the Anti-PD-L1 antibodies secreted in the tumor microenvironment are able to revert T cell exhaustion, facilitating the Anti-CAIX CART cells antitumor activity. These Anti-CAIX CART cells, mainly the ones secreting anti-PD-L1, are also able to diminish the proliferation of CAIX+ RCC cells, resulting in a slow tumor growth and small tumor size and weight in an orthotopic NSG mice model of RCC. In addition, Anti-CAIX CART cell secreting the IgG1 isotype of Anti-PD-L1 was also able to induce ADCC in vitro and increased the number of human NK cells infiltrating the tumor site in vivo. The human NK cells were injected only in 2 mice of each group, two days before their euthanasia to determine the NK cells capacity to recognize the IgG1 isotype of the Anti-PD-L1 in vivo, which was attested. The injection of human NK cells was not made in the beginning of the treatment once our previous experience with this mice model showed that these cells last only for a few days in their blood

[0102] In one embodiment, the injection of CART cells into mice was performed without the addition of interleukins to avoid their influence in the therapeutic effect of CART cells alone.

[0103] In another embodiment, CART cells can be maintained with the use of cytokines such as, for example, IL-2, IL-4, IL-7, IL-9, IL-15 and IL-21.

[0104] Cytokines sharing the ye receptor, like IL-2, IL-4, IL-7, IL-9, IL-15 and IL-21 are important for the development and maintenance of memory T cells. Among them, IL-21 promote a less differentiated phenotype, associated with an enrichment of tumor-specific CD8 T cells, with increased anti-tumor effect in a mouse melanoma model when compared to IL-2 or IL-15.

[0105] In certain embodiments, CART cells are maintained with IL-21.

[0106] CAIX is a consistent marker for development of cancer targeted systemic therapies due to it overexpression in many tumors, remarkably in cRCC, but it is also expressed physiologically in a few tissues.

[0107] In one embodiment, the anti-CAIX scFv in the CAR recognizes the catalytic domain of CAIX, located in the central portion of the protein, which could increase its specificity to sites of higher expression of CAIX.

[0108] The choice of CD28 as a co-stimulatory domain for the CARs presented herein was based in the fact that CD28 CARs direct an active proliferative response and enhance effector functions, whereas 4-1BB-based CARs induce a more progressive T cell accumulation that may counterweigh for less immediate effectiveness. In one embodiment, the CD28 is replaced by 41BB in the CAR constructs.

[0109] T cell exhaustion is common in cancer and these T cells present low capacities of proliferation and cytokine production associated with high apoptosis rate and expression of inhibitory receptors like PD-1, Tim-3 and Lag3. New strategies for preventing T cell exhaustion include of PD-1/PD-L1 axis.

[0110] The methods and compositions presented herein provide Anti-CAIX CART cells-secreting Anti-PD-L1 IgG1 or IgG4 that can diminish T cell exhaustion, improving CART cell efficiency in the cRCC treatment in vitro and in vivo.

Introduction of Constructs into CTLs

[0111] Expression vectors that encode the CARs can be introduced as one or more DNA molecules or constructs, where there may be at least one marker that will allow for selection of host cells that contain the construct(s).

[0112] The constructs can be prepared in conventional ways, where the genes and regulatory regions may be isolated, as appropriate, ligated, cloned in an appropriate cloning host, analyzed by restriction or sequencing, or other convenient means. Particularly, using PCR, individual fragments including all or portions of a functional unit may be isolated, where one or more mutations may be introduced using “primer repair”, ligation, in vitro mutagenesis, etc., as appropriate. The construct(s) once completed and demonstrated to have the appropriate sequences may then be introduced into the CTL by any convenient means. The constructs may be integrated and packaged into non-replicating, defective viral genomes like Adenovirus, Adeno-associated virus (AAV), or Herpes simplex virus (HSV) or others, including retroviral vectors or lentiviral vectors, for infection or transduction into cells. The constructs may include viral sequences for transfection, if desired. Alternatively, the construct may be introduced by fusion, electroporation, biolistics, transfection, lipofection, or the like. The host cells may be grown and expanded in culture before introduction of the construct(s), followed by the appropriate treatment for introduction of the construct(s) and integration of the construct(s). The cells are then expanded and screened by virtue of a marker present in the construct. Various markers that may be used successfully include hprt, neomycin resistance, thymidine kinase, hygromycin resistance, etc.

[0113] In some instances, one may have a target site for homologous recombination, where it is desired that a construct be integrated at a particular locus. For example,) can knock-out an endogenous gene and replace it (at the same locus or elsewhere) with the gene encoded for by the construct using materials and methods as are known in the art for homologous recombination. For homologous recombination, one may use either OMEGA. or O-vectors. See, for example, Thomas and Capecchi, Cell (1987) 51, 503-512; Mansour, et al., Nature (1988) 336, 348-352; and Joyner, et al., Nature (1989) 338, 153-156.

[0114] The constructs may be introduced as a single DNA molecule encoding at least the CAR and optionally another gene, or different DNA molecules having one or more genes. Other genes include genes that encode therapeutic molecules or suicide genes, for example. The constructs may be introduced simultaneously or consecutively, each with the same or different markers.

[0115] Vectors containing useful elements such as bacterial or yeast origins of replication, selectable and/or amplifiable markers, promoter/enhancer elements for expression in prokaryotes or eukaryotes, etc. that may be used to prepare stocks of construct DNAs and for carrying out transfections are well known in the art, and many are commercially available.

### Methods of Use

[0116] The cells according to the invention can be used for treating cancer, viral infections or autoimmune disorders in a patient in need thereof. In another embodiment, said isolated cell according to the invention can be used in the manufacture of a medicament for treatment of a cancer, viral infections of autoimmune disorders, in a patient in need thereof.

[0117] The present invention relies on methods for treating patients in need thereof, said method comprising at least one of the following steps: (a) providing a chimeric antigen receptor cells according to the invention and (b) administrating the cells to said patient.

[0118] Said treatment can be ameliorating, curative or prophylactic. It may be either part of an autologous immunotherapy or part of an allogenic immunotherapy treatment. By autologous, it is meant that cells, cell line or population of cells used for treating patients are originating from said patient or from a Human Leucocyte Antigen (HLA) compatible donor. By allogeneic is meant that the cells or population of cells used for treating patients are not originating from said patient but from a donor.

[0119] The invention is particularly suited for allogenic immunotherapy, insofar as it enables the transformation of T-cells, typically obtained from donors, into non-alloreactive cells. This may be done under standard protocols and reproduced as many times as needed. The resulted modified T cells may be pooled and administrated to one or several patients, being made available as an “off the shelf” therapeutic product.

[0120] Cells that can be used with the disclosed methods are described in the previous section. Said treatment can be used to treat patients diagnosed with cancer, viral infection, autoimmune disorders or Graft versus Host Disease (GvHD). Cancers that may be treated include tumors that are not vascularized, or not yet substantially vascularized, as well as vascularized tumors. The cancers may comprise nonsolid tumors (such as hematological tumors, for example, leukemias and lymphomas) or may comprise solid tumors. Types of cancers to be treated with the CARs of the invention include, but are not limited to, carcinoma, blastoma, and sarcoma, and certain leukemia or lymphoid malignancies, benign and malignant tumors, and malignancies e.g., sarcomas, carcinomas, and melanomas. Adult tumors/cancers and pediatric tumors/cancers are also included.

[0121] It can be a treatment in combination with one or more therapies against cancer selected from the group of antibodies therapy, chemotherapy, cytokines therapy, dendritic cell therapy, gene therapy, hormone therapy, laser light therapy and radiation therapy.

[0122] According to a preferred embodiment of the invention, said treatment can be administrated into patients undergoing an immunosuppressive treatment. Indeed, the present invention preferably relies on cells or population of cells, which have been made resistant to at least one immunosuppressive agent due to the inactivation of a gene encoding a receptor for such immunosuppressive agent. In this aspect, the immunosuppressive treatment should help the selection and expansion of the T-cells according to the invention within the patient.

[0123] In a further embodiment, the cell compositions of the present invention are administered to a patient in conjunction with (e.g., before, simultaneously or following) bone marrow transplantation, T cell ablative therapy using either chemotherapy agents such as, fludarabine, external-beam radiation therapy (XRT), cyclophosphamide, or antibodies such as OKT3 or CAM PATH. In another embodiment, the cell compositions of the present invention are administered following B-cell ablative therapy such as agents that react with CD20, e.g., Rituxan. For example, in one embodiment, subjects may undergo standard treatment with high dose chemotherapy followed by peripheral blood stem cell transplantation. In certain embodiments, following the transplant, subjects receive an infusion of the expanded immune cells of the present invention. In an additional embodiment, expanded cells are administered before or following surgery. Said modified cells obtained by any one of the methods described here can be used in a particular aspect of the invention for treating patients in need thereof against Host versus Graft (HvG) rejection and Graft versus Host Disease (GvHD); therefore in the scope of the present invention is a method of treating patients in need thereof against Host versus Graft (HvG) rejection and Graft versus Host Disease (GvHD) comprising treating said patient by administering to said patient an effective amount of modified cells comprising inactivated TCR alpha and/or TCR beta genes.

### Administration of Cells

[0124] The invention is particularly suited for allogenic immunotherapy, insofar as it enables the transformation of T-cells, typically obtained from donors, into non-alloreactive cells. This may be done under standard protocols and reproduced as many times as needed. The resulted modified T cells may be pooled and administrated to one or several patients, being made available as an “off the shelf” therapeutic product.

[0125] Depending upon the nature of the cells, the cells may be introduced into a host organism, e.g. a mammal, in a wide variety of ways. The cells may be introduced at the site of the tumor, in specific embodiments, although in alternative embodiments the cells hone to the cancer or are modified to hone to the cancer. The number of cells that are employed will depend upon a number of circumstances, the purpose for the introduction, the lifetime of the cells, the protocol to be used, for example, the number of administrations, the ability of the cells to multiply, the stability of the recombinant construct, and the like. The cells may be applied as a dispersion, generally being injected at or near the site of interest. The cells may be in a physiologically-acceptable medium.

[0126] In some embodiments, the cells are encapsulated to inhibit immune recognition and placed at the site of the tumor.

[0127] The cells may be administered as desired. Depending upon the response desired, the manner of administration, the life of the cells, the number of cells present, various protocols may be employed. The number of administrations will depend upon the factors described above at least in part.

[0128] The administration of the cells or population of cells according to the present invention may be carried out in any convenient manner, including by aerosol inhalation, injection, ingestion, transfusion, implantation or transplantation. The compositions described herein may be administered to a patient subcutaneously, intradermaly, intratumorally, intranodally, intramedullary, intramuscularly, by intravenous or intralymphatic injection, or intraperitoneally. In one embodiment, the cell compositions of the present invention are preferably administered by intravenous injection.

[0129] The administration of the cells or population of cells can consist of the administration of 10⁴-10⁹ cells per kg body weight, preferably 10⁵ to 10⁶ cells/kg body weight including all integer values of cell numbers within those ranges. The cells or population of cells can be administrated in one or more doses. In another embodiment, said effective amount of cells are administrated as a single dose. In another embodiment, said effective amount of cells are administrated as more than one dose over a period time. Timing of administration is within the judgment of managing physician and depends on the clinical condition of the patient. The cells or population of cells may be obtained from any source, such as a blood bank or a donor. While individual needs vary, determination of optimal ranges of effective amounts of a given cell type for a particular disease or conditions within the skill of the art. An effective amount means an amount which provides a therapeutic or prophylactic benefit. The dosage administrated will be dependent upon the age, health and weight of the recipient, kind of concurrent treatment, if any, frequency of treatment and the nature of the effect desired.

[0130] It should be appreciated that the system is subject to many variables, such as the cellular response to the ligand, the efficiency of expression and, as appropriate, the level of secretion, the activity of the expression product, the particular need of the patient, which may vary with time and circumstances, the rate of loss of the cellular activity as a result of loss of cells or expression activity of individual cells, and the like. Therefore, it is expected that for each individual patient, even if there were universal cells which could be administered to the population at large, each patient would be monitored for the proper dosage for the individual, and such practices of monitoring a patient are routine in the art.

### Nucleic Acid-Based Expression Systems

[0131] The CARs of the present invention may be expressed from an expression vector. Recombinant techniques to generate such expression vectors are well known in the art.

### Vectors

[0132] The term “vector” is used to refer to a carrier nucleic acid molecule into which a nucleic acid sequence can be inserted for introduction into a cell where it can be replicated. A nucleic acid sequence can be “exogenous,” which means that it is foreign to the cell into which the vector is being introduced or that the sequence is homologous to a sequence in the cell but in a position within the host cell nucleic acid in which the sequence is ordinarily not found. Vectors include plasmids, cosmids, viruses (bacteriophage, animal viruses, and plant viruses), and artificial chromosomes (e.g., YACs). One of skill in the art would be well equipped to construct a vector through standard recombinant techniques (see, for example, Maniatis et al., 1988 and Ausubel et al., 1994, both incorporated herein by reference).

[0133] The term “expression vector” refers to any type of genetic construct comprising a nucleic acid coding for a RNA capable of being transcribed. In some cases, RNA molecules are then translated into a protein, polypeptide, or peptide. In other cases, these sequences are not translated, for example, in the production of antisense molecules or ribozymes. Expression vectors can contain a variety of “control sequences,” which refer to nucleic acid sequences necessary for the transcription and possibly translation of an operably linked coding sequence in a particular host cell. In addition to control sequences that govern transcription and translation, vectors and expression vectors may contain nucleic acid sequences that serve other functions as well and are described infra.

### Promoters and Enhancers

[0134] A “promoter” is a control sequence that is a region of a nucleic acid sequence at which initiation and rate of transcription are controlled. It may contain genetic elements at which regulatory proteins and molecules may bind, such as RNA polymerase and other transcription factors, to initiate the specific transcription a nucleic acid sequence. The phrases “operatively positioned,” “operatively linked,” “under control,” and “under transcriptional control” mean that a promoter is in a correct functional location and/or orientation in relation to a nucleic acid sequence to control transcriptional initiation and/or expression of that sequence.

[0135] A promoter generally comprises a sequence that functions to position the start site for RNA synthesis. The best known example of this is the TATA box, but in some promoters lacking a TATA box, such as, for example, the promoter for the mammalian terminal deoxynucleotidyl transferase gene and the promoter for the SV40 late genes, a discrete element overlying the start site itself helps to fix the place of initiation. Additional promoter elements regulate the frequency of transcriptional initiation. Typically, these are located in the region 30 110 bp upstream of the start site, although a number of promoters have been shown to contain functional elements downstream of the start site as well. To bring a coding sequence “under the control of” a promoter, one positions the 5′ end of the transcription initiation site of the transcriptional reading frame “downstream” of (i.e., 3′ of) the chosen promoter. The “upstream” promoter stimulates transcription of the DNA and promotes expression of the encoded RNA.

[0136] The spacing between promoter elements frequently is flexible, so that promoter function is preserved when elements are inverted or moved relative to one another. In the tk promoter, the spacing between promoter elements can be increased to 50 bp apart before activity begins to decline. Depending on the promoter, it appears that individual elements can function either cooperatively or independently to activate transcription. A promoter may or may not be used in conjunction with an “enhancer,” which refers to a cis-acting regulatory sequence involved in the transcriptional activation of a nucleic acid sequence.

[0137] A promoter may be one naturally associated with a nucleic acid sequence, as may be obtained by isolating the 5 prime′ non-coding sequences located upstream of the coding segment and/or exon. Such a promoter can be referred to as “endogenous.” Similarly, an enhancer may be one naturally associated with a nucleic acid sequence, located either downstream or upstream of that sequence. Alternatively, certain advantages will be gained by positioning the coding nucleic acid segment under the control of a recombinant or heterologous promoter, which refers to a promoter that is not normally associated with a nucleic acid sequence in its natural environment. A recombinant or heterologous enhancer refers also to an enhancer not normally associated with a nucleic acid sequence in its natural environment. Such promoters or enhancers may include promoters or enhancers of other genes, and promoters or enhancers isolated from any other virus, or prokaryotic or eukaryotic cell, and promoters or enhancers not “naturally occurring,” i.e., containing different elements of different transcriptional regulatory regions, and/or mutations that alter expression. For example, promoters that are most commonly used in recombinant DNA construction include the lactamase (penicillinase), lactose and tryptophan (trp) promoter systems. In addition to producing nucleic acid sequences of promoters and enhancers synthetically, sequences may be produced using recombinant cloning and/or nucleic acid amplification technology, including PCR™, in connection with the compositions disclosed herein (see U.S. Pat. Nos. 4,683,202 and 5,928,906, each incorporated herein by reference). Furthermore, it is contemplated the control sequences that direct transcription and/or expression of sequences within non-nuclear organelles such as mitochondria, chloroplasts, and the like, can be employed as well.

[0138] Naturally, it will be important to employ a promoter and/or enhancer that effectively directs the expression of the DNA segment in the organelle, cell type, tissue, organ, or organism chosen for expression. Those of skill in the art of molecular biology generally know the use of promoters, enhancers, and cell type combinations for protein expression, (see, for example Sambrook et al. 1989, incorporated herein by reference). The promoters employed may be constitutive, tissue-specific, inducible, and/or useful under the appropriate conditions to direct high level expression of the introduced DNA segment, such as is advantageous in the large-scale production of recombinant proteins and/or peptides. The promoter may be heterologous or endogenous.

[0139] Additionally any promoter/enhancer combination could also be used to drive expression. Use of a T3, T7 or SP6 cytoplasmic expression system is another possible embodiment. Eukaryotic cells can support cytoplasmic transcription from certain bacterial promoters if the appropriate bacterial polymerase is provided, either as part of the delivery complex or as an additional genetic expression construct.

[0140] The identity of tissue-specific promoters or elements, as well as assays to characterize their activity, is well known to those of skill in the art.

[0141] A specific initiation signal also may be required for efficient translation of coding sequences. These signals include the ATG initiation codon or adjacent sequences. Exogenous translational control signals, including the ATG initiation codon, may need to be provided. One of ordinary skill in the art would readily be capable of determining this and providing the necessary signals

[0142] In certain embodiments of the invention, the use of internal ribosome entry sites (IRES) elements are used to create multigene, or polycistronic, messages, and these may be used in the invention.

[0143] Vectors can include a multiple cloning site (MCS), which is a nucleic acid region that contains multiple restriction enzyme sites, any of which can be used in conjunction with standard recombinant technology to digest the vector. “Restriction enzyme digestion” refers to catalytic cleavage of a nucleic acid molecule with an enzyme that functions only at specific locations in a nucleic acid molecule. Many of these restriction enzymes are commercially available. Use of such enzymes is widely understood by those of skill in the art. Frequently, a vector is linearized or fragmented using a restriction enzyme that cuts within the MCS to enable exogenous sequences to be ligated to the vector. “Ligation” refers to the process of forming phosphodiester bonds between two nucleic acid fragments, which may or may not be contiguous with each other. Techniques involving restriction enzymes and ligation reactions are well known to those of skill in the art of recombinant technology.

[0144] Splicing sites, termination signals, origins of replication, and selectable markers may also be employed.

### Plasmid Vectors

[0145] In certain embodiments, a plasmid vector is contemplated for use to transform a host cell. In general, plasmid vectors containing replicon and control sequences which are derived from species compatible with the host cell are used in connection with these hosts. The vector ordinarily carries a replication site, as well as marking sequences which are capable of providing phenotypic selection in transformed cells. In a non-limiting example, E. coli is often transformed using derivatives of pBR322, a plasmid derived from an E. coli species. pBR322 contains genes for ampicillin and tetracycline resistance and thus provides easy means for identifying transformed cells. The pBR plasmid, or other microbial plasmid or phage must also contain, or be modified to contain, for example, promoters which can be used by the microbial organism for expression of its own proteins.

[0146] In addition, phage vectors containing replicon and control sequences that are compatible with the host microorganism can be used as transforming vectors in connection with these hosts. For example, the phage lambda GEM. TM. 11 may be utilized in making a recombinant phage vector which can be used to transform host cells, such as, for example, E. coli LE392.

[0147] Further useful plasmid vectors include pIN vectors (Inouye et al., 1985); and pGEX vectors, for use in generating glutathione S transferase (GST) soluble fusion proteins for later purification and separation or cleavage. Other suitable fusion proteins are those with galactosidase, ubiquitin, and the like.

[0148] Bacterial host cells, for example, E. coli, comprising the expression vector, are grown in any of a number of suitable media, for example, LB. The expression of the recombinant protein in certain vectors may be induced, as would be understood by those of skill in the art, by contacting a host cell with an agent specific for certain promoters, e.g., by adding IPTG to the media or by switching incubation to a higher temperature. After culturing the bacteria for a further period, generally of between 2 and 24 h, the cells are collected by centrifugation and washed to remove residual media.

### Viral Vectors

[0149] The ability of certain viruses to infect cells or enter cells via receptor mediated endocytosis, and to integrate into host cell genome and express viral genes stably and efficiently have made them attractive candidates for the transfer of foreign nucleic acids into cells (e.g., mammalian cells). Components of the present invention may be a viral vector that encodes one or more CARs of the invention. Non-limiting examples of virus vectors that may be used to deliver a nucleic acid of the present invention are described below.

### Adenoviral Vectors

[0150] A particular method for delivery of the nucleic acid involves the use of an adenovirus expression vector. Although adenovirus vectors are known to have a low capacity for integration into genomic DNA, this feature is counterbalanced by the high efficiency of gene transfer afforded by these vectors. “Adenovirus expression vector” is meant to include those constructs containing adenovirus sequences sufficient to (a) support packaging of the construct and (b) to ultimately express a tissue or cell specific construct that has been cloned therein. Knowledge of the genetic organization or adenovirus, a 36 kb, linear, double stranded DNA virus, allows substitution of large pieces of adenoviral DNA with foreign sequences up to 7 kb (Grunhaus and Horwitz, 1992).

### AAV Vectors

[0151] The nucleic acid may be introduced into the cell using adenovirus assisted transfection. Increased transfection efficiencies have been reported in cell systems using adenovirus coupled systems (Kelleher and Vos, 1994; Cotten et al., 1992; Curiel, 1994). Adeno associated virus (AAV) is an attractive vector system for use in the cells of the present invention as it has a high frequency of integration and it can infect nondividing cells, thus making it useful for delivery of genes into mammalian cells, for example, in tissue culture (Muzyczka, 1992) or in vivo. AAV has a broad host range for infectivity (Tratschin et al., 1984; Laughlin et al., 1986; Lebkowski et al., 1988; McLaughlin et al., 1988). Details concerning the generation and use of rAAV vectors are described in U.S. Pat. Nos. 5,139,941 and 4,797,368, each incorporated herein by reference.

### Retroviral Vectors

[0152] Retroviruses are useful as delivery vectors because of their ability to integrate their genes into the host genome, transferring a large amount of foreign genetic material, infecting a broad spectrum of species and cell types and of being packaged in special cell lines (Miller, 1992).

[0153] In order to construct a retroviral vector, a nucleic acid (e.g., one encoding the desired sequence) is inserted into the viral genome in the place of certain viral sequences to produce a virus that is replication defective. In order to produce virions, a packaging cell line containing the gag, pol, and env genes but without the LTR and packaging components is constructed (Mann et al., 1983). When a recombinant plasmid containing a cDNA, together with the retroviral LTR and packaging sequences is introduced into a special cell line (e.g., by calcium phosphate precipitation for example), the packaging sequence allows the RNA transcript of the recombinant plasmid to be packaged into viral particles, which are then secreted into the culture media (Nicolas and Rubenstein, 1988; Temin, 1986; Mann et al., 1983). The media containing the recombinant retroviruses is then collected, optionally concentrated, and used for gene transfer. Retroviral vectors are able to infect a broad variety of cell types. However, integration and stable expression require the division of host cells (Paskind et al., 1975).

[0154] Lentiviruses are complex retroviruses, which, in addition to the common retroviral genes gag, pol, and env, contain other genes with regulatory or structural function. Lentiviral vectors are well known in the art (see, for example, Naldini et al., 1996; Zufferey et al., 1997; Blomer et al., 1997; U.S. Pat. Nos. 6,013,516 and 5,994,136). Some examples of lentivirus include the Human Immunodeficiency Viruses: HIV-1, HIV-2 and the Simian Immunodeficiency Virus: SIV. Lentiviral vectors have been generated by multiply attenuating the HIV virulence genes, for example, the genes env, vif, vpr, vpu and nef are deleted making the vector biologically safe.

[0155] Recombinant lentiviral vectors are capable of infecting non-dividing cells and can be used for both in vivo and ex vivo gene transfer and expression of nucleic acid sequences. For example, recombinant lentivirus capable of infecting a non-dividing cell wherein a suitable host cell is transfected with two or more vectors carrying the packaging functions, namely gag, pol and env, as well as rev and tat is described in U.S. Pat. No. 5,994,136, incorporated herein by reference. One may target the recombinant virus by linkage of the envelope protein with an antibody or a particular ligand for targeting to a receptor of a particular cell-type. By inserting a sequence (including a regulatory region) of interest into the viral vector, along with another gene which encodes the ligand for a receptor on a specific target cell, for example, the vector is now target-specific.

### Other Viral Vectors

[0156] Other viral vectors may be employed as vaccine constructs in the present invention. Vectors derived from viruses such as vaccinia virus (Ridgeway, 1988; Baichwal and Sugden, 1986; Coupar et al., 1988), sindbis virus, cytomegalovirus and herpes simplex virus may be employed. They offer several attractive features for various mammalian cells (Friedmann, 1989; Ridgeway, 1988; Baichwal and Sugden, 1986; Coupar et al., 1988; Horwich et al., 1990).

### Delivery Using Modified Viruses

[0157] A nucleic acid to be delivered may be housed within an infective virus that has been engineered to express a specific binding ligand. The virus particle will thus bind specifically to the cognate receptors of the target cell and deliver the contents to the cell. A novel approach designed to allow specific targeting of retrovirus vectors was developed based on the chemical modification of a retrovirus by the chemical addition of lactose residues to the viral envelope. This modification can permit the specific infection of hepatocytes via sialoglycoprotein receptors.

[0158] Another approach to targeting of recombinant retroviruses was designed in which biotinylated antibodies against a retroviral envelope protein and against a specific cell receptor were used. The antibodies were coupled via the biotin components by using streptavidin (Roux et al., 1989). Using antibodies against major histocompatibility complex class I and class II antigens, they demonstrated the infection of a variety of human cells that bore those surface antigens with an ecotropic virus in vitro (Roux et al., 1989).

### Vector Delivery and Cell Transformation

[0159] Suitable methods for nucleic acid delivery for transfection or transformation of cells are known to one of ordinary skill in the art. Such methods include, but are not limited to, direct delivery of DNA such as by ex vivo transfection, by injection, and so forth. Through the application of techniques known in the art, cells may be stably or transiently transformed.

### Ex Vivo Transformation

[0160] Methods for transfecting eukaryotic cells and tissues removed from an organism in an ex vivo setting are known to those of skill in the art. Thus, it is contemplated that cells or tissues may be removed and transfected ex vivo using nucleic acids of the present invention. In particular aspects, the transplanted cells or tissues may be placed into an organism. In preferred facets, a nucleic acid is expressed in the transplanted cells. Kits of the Invention

[0161] Any of the compositions described herein may be comprised in a kit. In a non-limiting example, one or more cells for use in cell therapy and/or the reagents to generate one or more cells for use in cell therapy that harbors recombinant expression vectors may be comprised in a kit. The kit components are provided in suitable container means.

[0162] Some components of the kits may be packaged either in aqueous media or in lyophilized form. The container means of the kits will generally include at least one vial, test tube, flask, bottle, syringe or other container means, into which a component may be placed, and preferably, suitably aliquoted. Where there are more than one component in the kit, the kit also will generally contain a second, third or other additional container into which the additional components may be separately placed. However, various combinations of components may be comprised in a vial. The kits of the present invention also will typically include a means for containing the components in close confinement for commercial sale. Such containers may include injection or blow molded plastic containers into which the desired vials are retained.

[0163] When the components of the kit are provided in one and/or more liquid solutions, the liquid solution is an aqueous solution, with a sterile aqueous solution being particularly useful. In some cases, the container means may itself be a syringe, pipette, and/or other such like apparatus, from which the formulation may be applied to an infected area of the body, injected into an animal, and/or even applied to and/or mixed with the other components of the kit.

[0164] However, the components of the kit may be provided as dried powder(s). When reagents and/or components are provided as a dry powder, the powder can be reconstituted by the addition of a suitable solvent. It is envisioned that the solvent may also be provided in another container means. The kits may also comprise a second container means for containing a sterile, pharmaceutically acceptable buffer and/or other diluent.

[0165] In particular embodiments of the invention, cells that are to be used for cell therapy are provided in a kit, and in some cases the cells are essentially the sole component of the kit. The kit may comprise reagents and materials to make the desired cell. In specific embodiments, the reagents and materials include primers for amplifying desired sequences, nucleotides, suitable buffers or buffer reagents, salt, and so forth, and in some cases the reagents include vectors and/or DNA that encodes a CAR as described herein and/or regulatory elements therefor.

[0166] In particular embodiments, there are one or more apparatuses in the kit suitable for extracting one or more samples from an individual. The apparatus may be a syringe, scalpel, and so forth.

[0167] In some cases of the invention, the kit, in addition to cell therapy embodiments, also includes a second cancer therapy, such as chemotherapy, hormone therapy, and/or immunotherapy, for example. The kit(s) may be tailored to a particular cancer for an individual and comprise respective second cancer therapies for the individual.

### Combination Therapy

[0168] In certain embodiments of the invention, methods of the present invention for clinical aspects are combined with other agents effective in the treatment of hyperproliferative disease, such as anti-cancer agents. An “anti-cancer” agent is capable of negatively affecting cancer in a subject, for example, by killing cancer cells, inducing apoptosis in cancer cells, reducing the growth rate of cancer cells, reducing the incidence or number of metastases, reducing tumor size, inhibiting tumor growth, reducing the blood supply to a tumor or cancer cells, promoting an immune response against cancer cells or a tumor, preventing or inhibiting the progression of cancer, or increasing the lifespan of a subject with cancer. More generally, these other compositions would be provided in a combined amount effective to kill or inhibit proliferation of the cell. This process may involve contacting the cancer cells with the expression construct and the agent(s) or multiple factor(s) at the same time. This may be achieved by contacting the cell with a single composition or pharmacological formulation that includes both agents, or by contacting the cell with two distinct compositions or formulations, at the same time, wherein one composition includes the expression construct and the other includes the second agent(s).

[0169] Tumor cell resistance to chemotherapy and radiotherapy agents represents a major problem in clinical oncology. One goal of current cancer research is to find ways to improve the efficacy of chemo- and radiotherapy by combining it with other therapies. In the context of the present invention, it is contemplated that cell therapy could be used similarly in conjunction with chemotherapeutic, radiotherapeutic, or immunotherapeutic intervention, as well as pro-apoptotic or cell cycle regulating agents.

[0170] Alternatively, the present inventive therapy may precede or follow the other agent treatment by intervals ranging from minutes to weeks. In embodiments where the other agent and present invention are applied separately to the individual, one would generally ensure that a significant period of time did not expire between the time of each delivery, such that the agent and inventive therapy would still be able to exert an advantageously combined effect on the cell. In such instances, it is contemplated that one may contact the cell with both modalities within about 12-24 h of each other and, more preferably, within about 6-12 h of each other. In some situations, it may be desirable to extend the time period for treatment significantly, however, where several d (2, 3, 4, 5, 6 or 7) to several wk (1, 2, 3, 4, 5, 6, 7 or 8) lapse between the respective administrations.

[0171] It is expected that the treatment cycles would be repeated as necessary. It also is contemplated that various standard therapies, as well as surgical intervention, may be applied in combination with the inventive cell therapy.

### Chemotherapy

[0172] Cancer therapies also include a variety of combination therapies with both chemical and radiation based treatments. Combination chemotherapies include, for example, abraxane, altretamine, docetaxel, herceptin, methotrexate, novantrone, zoladex, cisplatin (CDDP), carboplatin, procarbazine, mechlorethamine, cyclophosphamide, camptothecin, ifosfamide, melphalan, chlorambucil, busulfan, nitrosurea, dactinomycin, daunorubicin, doxorubicin, bleomycin, plicomycin, mitomycin, etoposide (VP16), tamoxifen, raloxifene, estrogen receptor binding agents, taxol, gemcitabien, navelbine, farnesyl-protein tansferase inhibitors, transplatinum, 5-fluorouracil, vincristin, vinblastin and methotrexate, or any analog or derivative variant of the foregoing and also combinations thereof.

[0173] In specific embodiments, chemotherapy for the individual is employed in conjunction with the invention, for example before, during and/or after administration of the invention

### Radiotherapy

[0174] Other factors that cause DNA damage and have been used extensively include what are commonly known as .gamma.-rays, X-rays, and/or the directed delivery of radioisotopes to tumor cells. Other forms of DNA damaging factors are also contemplated such as microwaves and UV-irradiation. It is most likely that all of these factors effect a broad range of damage on DNA, on the precursors of DNA, on the replication and repair of DNA, and on the assembly and maintenance of chromosomes. Dosage ranges for X-rays range from daily doses of 50 to 200 roentgens for prolonged periods of time (3 to 4 wk), to single doses of 2000 to 6000 roentgens. Dosage ranges for radioisotopes vary widely, and depend on the half-life of the isotope, the strength and type of radiation emitted, and the uptake by the neoplastic cells.

[0175] The terms “contacted” and “exposed,” when applied to a cell, are used herein to describe the process by which a therapeutic construct and a chemotherapeutic or radiotherapeutic agent are delivered to a target cell or are placed in direct juxtaposition with the target cell. To achieve cell killing or stasis, both agents are delivered to a cell in a combined amount effective to kill the cell or prevent it from dividing.

### Immunotherapy

[0176] Immunotherapeutics generally rely on the use of immune effector cells and molecules to target and destroy cancer cells. The immune effector may be, for example, an antibody specific for some marker on the surface of a tumor cell. The antibody alone may serve as an effector of therapy or it may recruit other cells to actually effect cell killing. The antibody also may be conjugated to a drug or toxin (chemotherapeutic, radionuclide, ricin A chain, cholera toxin, pertussis toxin, etc.) and serve merely as a targeting agent. Alternatively, the effector may be a lymphocyte carrying a surface molecule that interacts, either directly or indirectly, with a tumor cell target. Various effector cells include cytotoxic T cells and NK cells.

[0177] Immunotherapy other than the inventive therapy described herein could thus be used as part of a combined therapy, in conjunction with the present cell therapy. The general approach for combined therapy is discussed below. Generally, the tumor cell must bear some marker that is amenable to targeting, i.e., is not present on the majority of other cells. Many tumor markers exist and any of these may be suitable for targeting in the context of the present invention. Common tumor markers include PD-1, PD-L1, CTLA4, carcinoembryonic antigen, prostate specific antigen, urinary tumor associated antigen, fetal antigen, tyrosinase (p97), gp68, TAG-72, HMFG, Sialyl Lewis Antigen, MucA, MucB, PLAP, estrogen receptor, laminin receptor, erb B and p155.

### Genes

[0178] In yet another embodiment, the secondary treatment is a gene therapy in which a therapeutic polynucleotide is administered before, after, or at the same time as the present invention clinical embodiments. A variety of expression products are encompassed within the invention, including inducers of cellular proliferation, inhibitors of cellular proliferation, or regulators of programmed cell death.

### Surgery

[0179] Approximately 60% of persons with cancer will undergo surgery of some type, which includes preventative, diagnostic or staging, curative and palliative surgery. Curative surgery is a cancer treatment that may be used in conjunction with other therapies, such as the treatment of the present invention, chemotherapy, radiotherapy, hormonal therapy, gene therapy, immunotherapy and/or alternative therapies.

[0180] Curative surgery includes resection in which all or part of cancerous tissue is physically removed, excised, and/or destroyed. Tumor resection refers to physical removal of at least part of a tumor. In addition to tumor resection, treatment by surgery includes laser surgery, cryosurgery, electrosurgery, and miscopically controlled surgery (Mohs' surgery). It is further contemplated that the present invention may be used in conjunction with removal of superficial cancers, precancers, or incidental amounts of normal tissue.

[0181] Upon excision of part of all of cancerous cells, tissue, or tumor, a cavity may be formed in the body. Treatment may be accomplished by perfusion, direct injection or local application of the area with an additional anti-cancer therapy. Such treatment may be repeated, for example, every 1, 2, 3, 4, 5, 6, or 7 days, or every 1, 2, 3, 4, and 5 weeks or every 1, 2, 3, 4, 5, 6, 7, 8, 9, 10, 11, or 12 months. These treatments may be of varying dosages as well.

### Other Agents

[0182] It is contemplated that other agents may be used in combination with the present invention to improve the therapeutic efficacy of treatment. These additional agents include immunomodulatory agents, agents that affect the upregulation of cell surface receptors and GAP junctions, cytostatic and differentiation agents, inhibitors of cell adhesion, or agents that increase the sensitivity of the hyperproliferative cells to apoptotic inducers. Immunomodulatory agents include tumor necrosis factor; interferon alpha, beta, and gamma; IL-2 and other cytokines; F42K and other cytokine analogs; or MIP-1, MIP-1beta, MCP-1, RANTES, and other chemokines. It is further contemplated that the upregulation of cell surface receptors or their ligands such as Fas/Fas ligand, DR4 or DR5/TRAIL would potentiate the apoptotic inducing abilities of the present invention by establishment of an autocrine or paracrine effect on hyperproliferative cells. Increases intercellular signaling by elevating the number of GAP junctions would increase the anti-hyperproliferative effects on the neighboring hyperproliferative cell population. In other embodiments, cytostatic or differentiation agents can be used in combination with the present invention to improve the anti-hyperproliferative efficacy of the treatments. Inhibitors of cell adhesion are contemplated to improve the efficacy of the present invention. Examples of cell adhesion inhibitors are focal adhesion kinase (FAKs) inhibitors and Lovastatin. It is further contemplated that other agents that increase the sensitivity of a hyperproliferative cell to apoptosis, such as the antibody c225, could be used in combination with the present invention to improve the treatment efficacy.

### EXAMPLES

### Example 1: Materials and Methods

[0183] Cells, culture media and reagents. Human CAIX+ renal cell carcinoma cell lines sk-rc-52, sk-rc-09 and CAIX− sk-rc-59 were obtained from Dr. Gerd Ritter, Memorial Sloan-Kettering Cancer Center, New York. They were cultured at 37° C. with 5% CO₂ in R-10 complete medium containing RPMI 1640 medium (Life Technologies) supplemented with 10% FCS, 2 mmol/L L-glutamine, 100 U/ml penicillin, and 100 g/ml streptomycin (Sigma). Primary human T cells were maintained in R-10 with 10% human serum and 100 IU/ml recombinant human interleukin 2 (IL-2) (Chiron). Human embryonic kidney cell line 293T (ATCC) and mouse fibroblast NIH3T3 cells (ATCC) were grown in D-10 complete medium (Life Technologies) containing DMEM medium with 10% FCS, 100 U/ml penicillin, and 100 g/ml streptomycin (Sigma). Leukopacks obtained from the blood bank of the Children's Hospital Boston were collected from healthy volunteers with written informed consent.

[0184] In one embodiment, Human ccRCC cell lines, Skrc52, originally CAIX+/PD-L1−, and Skrc59, originally CAIX−/PD-L1+, were obtained from Dr. Gerd Ritter (Memorial Sloan-Kettering Cancer Center, New York). These cells were cultivated in RPMI 1640 Medium (Life Technologies) supplemented with 10% (v/v) heat-inactivated fetal bovine serum (FBS, Gibco), 100 IU/ml penicillin and 100 g/ml streptomycin. 293T (CRL-11268, ATCC) and Lenti-X 293T (Clontech) cells were grown in DMEM Medium (Life Technologies) supplemented with 10% FBS, 100 IU/ml penicillin and 100 g/ml streptomycin. All cell lines used in this project were transduced with luciferase through lentiviral transduction and maintained at 37° C. with 5% C02. The Skrc52 cells were selected for CAIX−/PD-L1− and CAIX+/PD-L1− cell populations by Fluorescence activated cell sorting (FACS) sorting. Skrc59 cells were engineered to express high levels of human CAIX and CAIX+/PD-L1+ were selected by FACS sorting.

Cloning of Anti-PD-L1 scFv-Fc IgG1 and IgG4 into a Bicistronic Lentiviral Vector Encoding an Anti-CAIX 2^{nd} Generation CAR

[0185] The anti-PD-L1 antibody (Ab) used to construct the CART cells was previously selected using a 27-billion-member human scFv phage display library against a full length PD-L1 in the form of paramagnetic proteoliposomes (manuscript in preparation). The DNA sequences that encoded the anti-PD-L1 scFv (Clone 42)-Fc IgG1 or IgG4 were codon optimized and synthesized (Genewiz) containing the restriction sites for 5′ NdeI and 3′ ClaI to allow further scFv-Fc cloning to replace ZsGreen in the lentiviral vector pHAGE-eIFα, signal-scFvG36 (anti-CAIX)-C9TAG-linker-CD28-CD3ζ-IRES-ZsGreen (e.g. CD28z). This anti-CAIX original vector was previously constructed and published (21). For the cloning of the negative controls, firstly we replaced anti-PD-L1 scFv with an anti-Severe Acute Respiratory Syndrome (SARS) scFv (Clone 11A) in the IgG1-Fc lentiviral vector containing the anti-CAIX G36 scFv CAR. The DNA sequence that coded for the anti-SARS scFv was amplified by PCR from the plasmid pHAGE CMV-Anti-SARS (11A) scFv-Fc-CD28-gp41-IRES-ZsGreen to insert the restriction sites for 5′ MluI and 3′ XbaI for further cloning using the MluI forward primer 5′ TCG ACG CGT GAG GTG CAG CTG GTG CAG T 3′ (SEQ ID NO: 1679) and XbaIreverse primer 5′ TCC TCTAGA CAG GAC GGT GAC CTT GGT CC 3′ (SEQ ID NO: 1680). The final pHAGE-eIFa-scFv G36 (anti-CAIX)-C9TAG-linker-CD28-CD3ζ-IRES-anti-SARS (11A) IgG1 was used as one of the negative controls. We also replaced the anti-CAIX scFv in the CAR structure containing the anti-SARS IgG1 for the anti-B cell maturation antigen (BCMA) scFv by double digestion of the pHAGE-eIFa-A716scFv (anti-BCMA)-C9TAG-linker-CD28-CD3ζ-IRES-ZsGreen and the pHAGE-eIFa-G36scFv(anti-CAIX)-C9TAG-linker-CD28-CD3ζ-IRES-anti-SARS(11A) IgG1 with NcoI and NotI. After the cloning processes we obtained four main plasmids to start the Lentiviruses production: Anti-CAIX CAR able to express anti-PD-L1 IgG1 (anti-CAIX/anti-PD-L1 IgG1), anti-CAIX CAR able to express anti-PD-L1 IgG4 (anti-CAIX/anti-PD-L1 IgG4), anti-CAIX CAR able to express an irrelevant anti-SARS Ab (anti-CAIX/anti-SARS IgG1) and anti-BCMA CAR able to express an irrelevant anti-SARS Ab (anti-BCMA/anti-SARS IgG1).

[0186] scFv isolation and conversion of scFv to scFv-Fc. CAIX-specific scFv antibodies were isolated from a non-immune human scFv phage library as previously reported and submitted to GenBank with accession numbers of GQ903548-GQ903561²³. scFv-coding DNA fragments from the pFarber phagemid were digested with SfiI/NotI sites and subcloned into the mammalian expression vector pcDNA3.1-F105L-hinge-stuffer which has a human IgG1 F105 leader sequence and the human IgG1 hinge-CH2-CH3 Fc portion to express scFv-Fc antibodies. Plasmids of scFv-Fc were transiently transfected into 293T cells by lipofectamine 2000 (Invitrogen), and expressed antibodies were purified using Sepharose protein A beads (Amersham Bioscience). Specific binding to CAIX was tested by staining with phage scFv antibodies or scFv converted into scFv-Fc format antibodies by incubation with CAIX-expressing 293T and sk-rc-52 cell lines, and with CAIX negative 293T and sk-rc-59 cell lines. In these experiments, irrelevant anti-HIV CCR5 antibody (clone A8)²⁵ or anti-SARS antibody (11A)²⁴ and fluorescently conjugated secondary antibodies alone were used as negative controls.

[0187] Construction of scFv-CD8-TCRζ and scFv-CD28-TCRζ constructs. Pz1, scFv-CD8-TCRζ, and P28z, scFv-CD28-TCRζ, DNA constructs in phagemid vector pSL1180 were obtained from Dr. Michel Sadelain, Memorial Sloan-Kettering Cancer Center, New York. In Pz1, the scFv and TCRζ intracellular domain are appended to N- and C-terminus of human CD8 chain, respectively. Similarly, in P28z, the scFv and TCRζ sequences are appended to the N- and C-terminus of human CD28, respectively. The amino acid sequence of human CD8 is 71 residues in length, consisting of 47 (aa 137-183), 23 (aa 184-206), and 2 (aa 207-208) residues of the CD8 extracellular and hinge, transmembrane, and cytoplasmic domains, respectively. The CD28 sequence in P28z is 107 residues in length, consisting of 40 (aa 114-153), 23 (aa 154-176), and 44 (aa 177-220) residues of the CD28 extracellular, transmembrane, and cytoplasmic domains respectively. The human CD3ζ intracellular domain common to both CARs consists of 112 amino acids (aa 52-163).

[0188] The nucleic acid sequence encoding an internal C9-tag (a nine-amino acid peptide of human rhodopsin, TETSQVAPA (SEQ ID NO: 1678)) with a GGGGS linker (SEQ ID NO: 1684) was amplified by PCR and was fused upstream with CD8-TCRC and CD28-TCRC sequences with 5′ NotI site and 3′ Pad sites. The primers used for cloning chimeric TCRC constructs are 5′ TAG GGC GCG GCC GCa acc gag acc agc cag gtg gcg ccc gcc GGG GGA GGA GGC AGC CCC ACC ACG ACG CCA GCG CCG CGA 3′ (SEQ ID NO: 1681) (forward primer for CD8 construct where italic is the NotI site, upper case is the C9 tag sequence, and underlining indicates the GGGGS linker (SEQ ID NO: 1684)), 5′ TAG GGC GCG GCC GCa acc gag acc agc cag gtg gcg ccc gcc GGC GGA GGA GGC AGC ATT GAA GTT ATG TAT CCT CCT CCT 3′ (SEQ ID NO: 1682) (forward primer for CD28 construct) and reverse primer for both constructs CTA GCC TTAAT TAA TTA GCG AGG AGG GGG CAG GGC CTG CAT (SEQ ID NO: 1683), italic is Pac I site. These DNA fragments encoded functional features which are arranged in accordance with the following sequence: NotI-C9tag (TETSQVQPQ)-GGGGS-CD8 or CD28-TCRC-Pad (“TETSQVQPQ” disclosed as 1686, “GGGGS” disclosed as 1684 and TETSQVQPQGGGGS as SEQ ID NOS 1685). The chimeric TCR constructs tagged with internal C9 peptide were cloned into the pcDNA3.1-F105L-hinge stuffer vector containing anti-CXCR4 scFv-Fc, clone 48, using NotI and PacI restriction sites. This design allowed us to insert chimeric TCR receptor constructs to replace Fc portion fragment. Later, anti-CAIX scFv (clone G36) and anti-CCR5 scFv (clone A8, as irrelevant scFv control) antibody fragments were cloned to replace anti-CXCR4 scFv at SfiI/NotI sites to create CAIX-specific chimeric TCR constructs.

[0189] The lentivirus vector pHAGE-CMV-DsRed-IRES-ZsGreen, and four HIV helper plasmids pHDM-Hgpm2 (HIV gag-pol), pMD-tat, pRC/CMV-rev, and an Env VSV-G pseudotype were obtained from Dr. Richard Mulligan, of the Virus Production Core at The Harvard Gene Therapy Initiative in Boston. The CMV promoter in pHAGE-CMV-IRES-ZsGreen was replaced by an EF1 promoter derived from the pSIN lentivirus vector at SpeI/NotI sites. One of the 5 scFv-Fc antibodies, G36, which possess high affinity to CAIX+ cells and high ADCC only against CAIX+ tumor cells, was cloned into pHAGE-EF1 lentivirus vector at AscI/BamHI to replace the first cassette of the DsRed protein.

[0190] Production of lentivirus and transduction of human primary T cells. Lentivirus was produced by five plasmid transient transfection into 293T cells using lipofectamine 2000 as per the manufacturer's instructions (Invitrogen). Cells were prepared for 80% confluence in 15 cm Petri dishes (Nalge Nunc) and transfected with 30 μg of total plasmid DNA. The ratio of vector plasmids (pHDM-Hgpm2 (HIV gag-pol): pMD-tat: pRC/CMV-rev: Env VSV-G pseudotype) was 20:1:1:1:2. After changing to D-10 medium, virus supernatant was harvested on day 3, filtrated through a 0.45 μm filter, and concentrated by ultracentrifugation (Beckman Coulter, Fullerton, CA) for 90 minutes at 16,500 rpm (48,960×g, Beckman SW28 rotor) and 4° C. The virus pellets were resuspended in R-10 medium and kept frozen at −80° C.

[0191] In one embodiment, Lentiviruses were produced by transient transfection of five plasmids into 293T cells using Polyethyleneimine (PEI). Briefly, each 80% confluent 293T cells in 15 cm plate (Nalge Nunc) was transfected with 30 μg of total five plasmids, being 5 μg of each structural plasmid pHDH-Hgpm2 (HIV gag-pol), pMD-tat; pRC/CMV-rev and Env VSV-G, and 10 μg of the main plasmid codifying the CAR (anti-CAIX/anti-PD-L1 IgG1, anti-CAIX/anti-PD-L1 IgG4, anti-CAIX/anti SARS IgG1 or anti-BCMA/anti SARS IgG1). The virus supernatant was concentrated using Lenti-X Concentrator (Clontech), following the manufacturer instructions, and kept frozen at −80° C.

[0192] Human PBMCs were isolated by ficoll density gradient separation and were activated with 2 μg/ml PHA (Sigma) plus 100 IU/ml human IL-2 for 4 days. The cells were infected with two or three rounds of lentivirus transduction at multiplicity of infection (MOI) of 10-20 in the presence of 10 μg/ml DEAE. Three days after transduction, transduced T cells were collected for phenotypic and functional analyses in vitro, or were expanded for in vivo experiments.

[0193] Selection, activation and lentivector transduction of CD8+ T cells. Blood collars collected from healthy volunteers with written informed consent were obtained from the blood bank of the Brigham and Woman's Hospital (Boston, MA). The isolation of human peripheral blood mononuclear cells (PBMCs) was performed using Ficoll-Paque PLUS (GE Healthcare, NJ). The Dynabeads for CD8 Positive Isolation (Life Technologies) were used to isolate CD8 positive cells from PBMCs, which were cultured in RPMI 1640 medium (Life Technologies) with 10% heat inactivated fetal bovine serum, 20 mM HEPES, 100 IU/ml penicillin and 100 g/ml streptomycin and 50 IU/mL of IL-21 (Peprotech) was added in the medium every 2 days. The assays performed to determine if IL-2 or IL-21 were the best cytokine to induce anti-CAIX CART cells proliferation were performed with 50 IU/mL of each cytokine. The CD8+ T cells were activated with Dynabeads Human T-Activator CD3/CD28 (Life Technologies) using a ratio of 1:1. The cells were transduced with the Lentiviruses at a multiplicity of infection of 20 and 10 μg/mL of Diethylaminoethyl. All the assays were performed in triplicate and using T cells from three different healthy donors.

[0194] Flow cytometric analysis. Transduction efficiency of human primary T cells was assessed by expression of a reporter gene (ZsGreen). The CAIX-Fc protein was expressed from a pcDNA3.1 plasmid that encoded amino acids 38-397 of CAIX followed by human IgG1 hinge, CH2 and CH3 domains, the CAIX signal peptide (aa 1-37) was replaced with Ig leader sequence. Expression of scFv(G250) on transduced T cells was tested by staining the cells with 1 μg CAIX-Fc protein, and then APC-conjugated mouse anti-human IgG antibody (Jackson ImmunoResearch). Additionally, expression of the internal rhodopsin nonapeptide (TETSQVAPA (SEQ ID NO: 1678)) C9 tag of the scFv domain of TCR constructs on transduced T cells was detected by staining with 5 μg mouse 1D4 antibody followed by APC-conjugated goat anti-mouse IgG antibody (Jackson ImmunoResearch). For analysis, the subsets of human cells in culture during clonal expansion experiment were stained with fluorescence conjugated mouse anti-human antibodies (Invitrogen) against CD3 (clone S4.1), CD4 (clone S3.5) or CD8 (clone 3B5). In all cell staining, five hundred thousand cells were stained with antibodies at recommended concentration according to company's instruction. The matched isotype control antibodies for each sample were used and the cells were analyzed using a FACSCalibur cytometer (Becton-Dickinson).

[0195] In one embodiment, transduction of 293T cells or CD8+ T cells was confirmed by FACS analysis of the anti-CAIX or anti-BCMA expression. The cells were stained with 10 μg/mL of human CAIX-Fc produced in our lab or human BCMA-mouse-Fc (AB Bioscience) and then developed with 1:250 APC-conjugated mouse anti-human IgG Ab (Southern Biotech) or goat-anti mouse IgG Ab (Biolegend), respectively. CountBright™ Absolute Counting Beads (Molecular Probes) was used for the proliferation and clonal expansion assays. All samples were analyzed with an LSR Fortessa or with a FACSCalibur (BD Bioscience) and data were analyzed using FlowJo software. To analyze the status of T cell exhaustion of the CART cells they were cultured in the presence of IL-21 50 U/mL (Peprotech) and Dynabeads Human T Activator CD3/CD28 for five days. After this period the CART cells were co-cultured with Skrc-59 CAIX+ PD-L1+ cells for 2 days in order to stimulate exhaustion. 1×106 CART cells from this assay and Tumor-infiltrating Lymphocytes (TIL) collected from the in vivo assay were stained with FITC-conjugated anti-human PD-1, PE-conjugated anti-human Tim3, PerCP/Cy5.5-conjugated anti-human Lag3 antibodies (Biolegend) and Pacific Blue-conjugated anti-human CD45 and and analyzed by FACS. To verify the expression levels of CAIX and PD-L1 in the different RCC cell lineages used in this project, we used 10 μg/mL of the anti-human CAIX mAb (Clone G36), produced in our laboratory, and 10 μg/mL of the biotinylated mouse anti-human PD-L1 (Biolegend). The primary antibodies were detected using 1:250 APC-conjugated anti-human Ab and PE-conjugated avidin, respectively, and analyzed by FACS.

[0196] ADCC and cytotoxicity assay of lentivirus transduced T cells. Cytotoxicity assays were performed using the DELFIA EuTDA Cytotoxicity kit (Perkin Elmer, Boston, MA) in accordance with the manufacturer's instructions. Briefly, target tumor cells were labeled with a fluorescent ligand (BATDA) for 30 minutes at 37° C. and 1×10⁴ labeled cells were loaded per well in 96-well U-bottom plate. For antibody-dependent cellular cytotoxicity (ADCC) assay, a panel of anti-CAIX scFv-Fc antibodies or irrelevant scFv-Fc antibody at a concentration of 1 μg/ml or 5 μg/ml was added separately. The assay was set up with ratios of effector cells (human PBMC) to target cells (E:T) at 50:1, 25:1 and 12.5:1. For the T cell cytoxicity assay, different ratios of effector cells (nontransduced or transduced T cells) to target cells (E:T) were prepared (100:1, 50:1 and 25:1). The culture was incubated for 4 hours in humidified 5% CO₂ at 37° C. After the plate was spun for 5 minutes at 500×g, 20 μl of supernatant was transferred to a flat-bottom plate. 200 μl of Europium solution was added and the fluorescence released from the cells was read by fluorometer (Victor™, PerkinElmer). The control for spontaneous release was prepared by culturing the labeling cells only and the control for maximum release was made by adding lysis buffer (kit provided) to the labeling cells.

[0197] ELISA, ELISPOT assays and Western blot. For cytokine secretion, RCC cell lines sk-rc-52 (CAIX+) or sk-rc-59 (CAIX−) were seeded overnight at 1×10⁶ per well in a 24-well plate, followed by 1×10⁶ untransduced or transduced T cells. Before co-culture with tumor cells, T cells were washed with PBS twice to remove human IL-2. After overnight incubation, the supernatant was harvested and analyzed for IL-2 and IFN- by ELISA (e-Bioscience). In detecting T cells for the IFN- ELISPOT assay (e-Bioscience), a membrane was developed using AEC substrate solution and the number of spots was counted by ELISPOT plate reader (C.T.L. Cellular Technology).

[0198] For Western blot, preparation of untransduced and transduced T cells was described⁵⁰. One million cells were prepared in non-reducing and reducing buffer (0.1 M dithiothreitol) and run on a 10-20% polyacrylamide gradient gel (Invitrogen). Proteins were transferred to polyvinylidence fluoride transfer membrane (NEN Life Science Products, Boston, MA) at 100 V, 4° C. overnight. The membrane was incubated with 1:2000 primary antibody, anti-human-chain monoclonal antibody 8D3 (BD Pharmingen, San Diego, CA) and then with 1:3000 secondary antibody horseradish peroxidase (Caltag). Immunodetection was performed using the ECL Plus Western blotting detection system (GE Healthcare, Piscataway, NJ) and x-ray film exposure.

[0199] Detection of IgG secreted by CART cells using ELISA. The total level of IgG secreted to the medium of transduced cells was detected using Human IgG ELISA Quantitation Set (Bethyl Laboratories). The Anti-PD-L1 Abs secreted by transduced CD8+ CART Cells were purified with Protein A sepharose beads (GE Healthcare) and biotinylated using the EZ-Link Sulfo-NHS-LC-Biotin (Thermo Scientific). These antibodies were incubated with 5 μg/mL of human PD-L1 produced in the lab, which was pre-immobilized in MaxiSorp plates (Nunc) by 2 hours, RT. The biotinylated antibodies were detected by incubation with streptavidin-TRP for 1 h and developed with SureBlue™ TMB Peroxidase Substrate and TMB Stop Solution (KPL). The absorbance was read at λ=450 nm.

[0200] Proliferation, clonal expansion and cytokine secretion after tumor cell contact. Tumor cells were irradiated (3,000 rads) and seeded at 2.5×10⁵ per well. T cells were added at 1×10⁶ in culture medium containing R-10 plus 100 IU/ml human IL-2 for a week culture. T cells were split to maintain suitable density and re-stimulated with tumor cells weekly. The number of T cells was counted every 3 or 4 days for 2 weeks. The percentage expression of ZsGreen by transduced T cells and T cell subsets were determined weekly by fluorescence-activated cell sorting (FACS). For cytokine secretion studies after tumor cell contact, T cells that were in contact with irradiated tumor cells for one or two weeks were washed, incubated with fresh tumor cells overnight and culture supernatants were collected after 24 hrs for analysis.

### Clonal Expansion of CAIX+ CART Cells.

[0201] In one embodiment, Skrc52 CAIX+/PD-L1− and Skrc52 CAIX−/PD-L1− cells were irradiated with 3,000 rads and seeded at 2.5×10⁵ per well. 1×10⁶ T cells were added at the culture medium containing 50 IU/ml human IL-21 every two days. T cells were split to maintain suitable density and re-stimulated with tumor cells weekly. T cell number was counted once a week for 3 weeks by FACS.

[0202] Effect of anti-CAIX CART Cells Secreting anti-PD-L1 antibodies on RCC cells viability and antibody-dependent cellular cytotoxicity (ADCC). 2.5×103 Skrc59 CAIX+/PD-L1+ and Skrc52 CAIX−/PD-L1− were plated in 96 wells plate ON. Four days after the CART cells transduction they were added to the RCC cells in the 25:1, 50:1 and 100:1 ratio Effector cells: Tumor cells (E:T) and incubated ON. CART cells were removed and the viability of the tumor cells was assayed for MTT (Life Technologies). For the ADCC assay RCC cells were incubated for 1 hour, 37° C. with 50 μL of the CART cells supernatant adjusted for 500 ng/mL of the respective Ab Anti-PD-L1 IgG1, Anti-PD-L1 IgG4 or Anti-SARS IgG1. The cells were then incubated with 12.5:1, 25:1 or 50:1 NK cells for 4 h, 37° C., Lactate dehydrogenase (LDH) was measured in the supernatant by CytoTox 96® Non-Radioactive Cytotoxicity Assay (Promega).

[0203] ELISA assays to detect IL-2 and IFNγ released by functional CART cells. For analysis of cytokine secretion, 2.5×103 RCC cells Skrc59 CAIX+/PD-L1+ or Skrc52 CAIX−/PD-L1-were seeded in 96 wells plates ON, followed by 5:1, 25:1 and 50:1 CAR transduced T cells addition and incubation ON. The supernatant was removed and analyzed for IL-2 and IFNγ secretion using the Human IFNγ or Human IL-2 ELISA Ready-SET-Go Kit (eBioscience).

[0204] Orthotopic Renal Cell Carcinoma Model Establishment and CART-Cells Therapy. 5×10⁴ passaged Skrc59 CAIX+/PD-L1+ cells were suspended in 10 μL of culture medium and diluted 1:1 in Matrigel™ (Life Technologies) and injected into the left subrenal capsule of 6-8 week-old male NSG mice (N=35). After a week, tumor implantation was confirmed by bioluminescence (BLI) image using a Xenogen IVIS imaging system (Life Technologies) and 1.0×107 of each CAR T cell (anti-BCMA CAR/anti-SARS IgG1, anti-CAIX CAR/anti SARS IgG1, anti-CAIX CAR/anti-PD-L1 IgG1 and anti-CAIX CAR/anti-PD-L1 IgG4) or untransduced T cells were injected intravenously in the tail vein (Day 0); N=6 mice per group. The tumor BLI was quantified after 7, 14, 23 and 30 days of CART cells injection. A second injection of 2.5×10⁶ CAR or untransduced T cells was made on day 17. Mice were sacrificed at 30 days post tumor engraftment by standard CO2 inhalation, and tumors were harvested and weighted. The kidney tumors from all mice were divided in two equal parts and one of them was fragmented in small pieces and digested with collagenase 0.5 U/mL and DNAse 1.0 mg/mL to TIL extraction, which were analyzed for the expression of the exhaustion markers and the percentage of CART cells by FACS. The other part was fixed in 10% buffered formaldehyde, and submitted to immunohistochemistry for different markers. Two mice of each group were injected with 4.5×106 NK cells 2 days before the euthanasia. NK cells present in the tumor were stained with APC-Anti-CD56 Ab and analyzed by FACS. Animal experiments were performed in accordance with the guidelines of the DFCI Animal Care Committee.

[0205] Tumor establishment and T cell therapy. In one embodiment, due to immune-rejection of sk-rc-52 in 6-8 week-old female BALB/c nude mice and to accelerate in vivo growth properties, five million cells were subcutaneously inoculated into the mice, harvested, and expanded in vitro. The cell line was then passaged two more times in nude mice and the passaged cells were expanded for further experiments (subclone 4-1). For the therapeutic experiments, 5 million sk-rc-59 and 7.5 million passaged sk-rc-52 cells were subcutaneously inoculated on opposing flanks into nude mice to yield comparable tumor growth rates. After 7 days, tumors grew to the size of −6 mm, and 50 million nontransduced or transduced T cells were injected intravenously. The mice were also treated with 20,000 IU human IL-2 by peritoneal injection every two days. Tumor size was measured by caliper in two dimensions and the mean of two tumor diameter was reported here. Animal experiments were performed in accordance with the guidelines of the Dana Farber Cancer Institute Animal Care Committee. Mice were sacrificed when tumors reached 15-mm diameter or 2,000 mm³ and tumors were harvested.

[0206] Immunohistochemistry and immunofluorescence staining. For in vitro examination of transduced T cells, the cultured T cells were washed twice using PBS and resuspended in 2 μM Far Red DDAO-SE CellTrace dye (Molecular Probe) in PBS for 15 minutes at 37° C. Then the cells were washed with culture medium twice and cytospun on the glass slide. Far red pre-stained CART cells with ZsGreen coexpression were visualized using confocal microscopy (Zeiss) at the Optical Imaging Core facility, Harvard NeuroDiscovery Center.

[0207] To examine the killing effect of transduced T cells in tumor bed in situ, tumors were prepared for frozen sections for ApopTag Peroxidase In Situ Apoptosis Detection kit (Millipore). Cryosections were incubated with TdT enzyme (Millipore) for 1 hour. Rabbit anti-DIG (Dako) was added and incubated for 30 minutes and then Cy3-conjugated anti-rabbit antibody (Invitrogen) was added and incubated for 30 minutes. Sections were mounted with DAPI antifade mounting medium and fluorescent images were examined using confocal microscopy.

[0208] Xenograft tumors and mouse spleens were harvested, fixed in 10% formalin/PBS solution, and submitted to the Harvard Medical School, Rodent Histopathology Core Facility. Paraffin-embedded sections were dewaxed with xylene and rehydrated through graded alcohols before staining. Immunohistochemistry staining was performed by incubating with anti-human granzyme B antibody (Dako, clone GrB-7 (1:200)) as a primary antibody for 1 hour followed by secondary anti-rabbit antibody (Pierce) or anti-mouse antibody (Dako) for 30 minutes. Sections were developed using DAB substrate and counterstained with hematoxylin.

[0209] In one embodiment, the fixed tumors were paraffin-embedded, sectioned at four-micrometer, placed on slides and prepared for IHQ. The tissues were stained with the anti human: Ki67 (Vector, VP-K451), PD-L1 (Clone 405.9A11, produced in Dr. Gordon Freeman's lab), granzyme B (Abcam, ab4059) or NCAM (CD56) (Abcam, ab133345) antibodies, followed by secondary HRP conjugated anti-rabbit Ab or HRP-Avidin. The slides were developed using DAB and counterstained with hematoxylin. The images were obtained in an Olympus BX51 microscopy using a DP71 digital camera (Olympus) and analyzed in the DP Controller Software (Olympus). The image quantification was performed using the IHC Profiler Plugin of ImageJ Software as described in Varghese F, Bukhari A B, Malhotra R, De A. IHC Profiler: an open source plugin for the quantitative evaluation and automated scoring of immunohistochemistry images of human tissue samples. PloS one. 2014; 9:e96801.

### Statistical Analyses.

[0210] Statistical significance was determined using the two-tailed Student's t-test.

[0211] The statistical analysis associated with FIGS. 16-23 are reprentative of at least three experiments unless otherwise noted. The statistical significance of the data was evaluated using ANOVA and Tukey posttest. P<0.05 was considered significant. The statistical analysis was performed using the IBM SPSS Statistics software version 20.

### Example 2: Adcc Mediated Killing of Anti-Caix Antibodies and Choice of Car Targeting Moiety

[0212] We have previously reported on a panel of high affinity human anti-CAIX antibodies that differed in their epitope mapping, expression levels and ability to internalize CAIX²³. Our first aim was to investigate the anti-tumor activity of five of these anti-CAIX single-chain antibodies as candidates for CAR construction. To test for anti-CAIX mAb mediated ADCC, the scFvs were converted to scFv-Fc (hIgG1) minibodies²³. We found that all scFv-Fcs exhibited antigen-specific tumor lysis. For tumor cell line sk-rc-09 with high CAIX+ expression, specific lysis ranged from 40-57% and for sk-rc-52 with moderate CAIX+ expression, specific lysis ranged from 46-60%, with background of lysis of <5% for the CAIX− tumor cell line sk-rc-59. For negative control scFv-Fcs such as anti-CXCR4 48-Fc²³ and anti-SARS 11A-Fc²⁴, only background levels of cell lysis were seen (FIG. 1). Based on ADCC killing and other published analyses, scFvG36 was chosen for further evaluation as the CAR targeting moiety.

[0213] Construction and expression of CAIX-specific chimeric receptors. Two generations of anti-CAIX CARs were constructed: 1^{st} generation G36 CD8 CAR, with scFvG36 linked to CD8, truncated extracellular, hinge, and transmembrane domains plus signaling domain of TCRζ (G36-CD8z). To deliver costimulatory signals, 2^{nd} generation CD28 CAR was generated, consisting of scFvG36 fused to truncated extracellular, transmembrane and intracellular domains of CD28 plus signaling domain of TCR (G36-CD28z) (FIG. 2A). Irrelevant 2^{nd} generation CD28 CAR was made by using anti-HIV CCR5 (clone A8) scFv instead²⁵. In order to detect the expression of these constructs, human rhodopsin C9 tag were inserted between the scFv and CD8 or CD28 domains, respectively and ZsGreen was expressed after the IRES sequence. High concentrations of viral stocks were obtained at comparable levels among the different constructs that were tested by cotransfection of vector plasmids into 293T cells (data not shown).

[0214] For transduction, PHA mitogen was used to stimulate peripheral blood lymphocytes for 3 days. Concentrated lentivirus supernatants were used to infect human primary T cells in the presence of cationic reagent DEAE as it increased the transduction rate of 1.5-2× fold as compared with polybrene (data not shown). The transduction rate of primary T cells ranged from 17% to 45% by ZsGreen expression in FACS analysis. A representative experiment showing ZsGreen expression in circa 25% by primary CART cells following lentivirus transduction is shown in FIG. 2B, left column. CAIX-Fc fusion protein can bind to the G36-CD8z and -CD28z CART cells but not to control A8-CD28z CART cells (FIG. 2B, middle column). C9-tag expression was only detected at circa one-third the level of the CAIX-Fc protein (FIG. 2B, right column) which is likely related to the finding that mAb 1D4 preferentially recognizes the rhodopsin nonapeptide C9 when presented as a carboxy-terminal verses internal polypeptide sequence (data not shown). Transduced cells that were cultured in vitro for 6 weeks maintained their expression of ZsGreen.

[0215] On Western blot under reducing conditions, G36 and A8 CD28z CARs migrated with a mol wt of circa 53 kD whereas endogenous TCR was 16 kDa. G36-CD8z CAR migrated with a mol wt of circa 48 kD. Under nonreducing conditions, these two CD28z CARs formed homodimers (FIG. 2C, data of CD8z CAR not shown).

### Example 3: Enhanced Cytokine Secretion by Transduced T Cells on Contact with Caix+ Tumor

[0216] A study was performed to compare the reported superior effects of using 2^{nd} generation G36-CD28z CART cells that incorporate signaling components of the costimulatory molecule CD28 to bypass MHC presentation and enhance T cell effector functions verses 1^{st} regeneration G36-CD8z CART cells. As seen in FIG. 3A, after incubation with CAIX+ sk-rc-52 cells overnight, only low levels of type I cytokines IL-2, IFNγ and IL-17 secretion were seen with control A8 CD28z CART cells or LAK cells alone. In contrast, both 1^{st} and 2^{nd} generation G36 expressing CART cells showed elevated levels of cytokine secretion with 2^{nd} generation G36-CD28z CART cells secreting higher amounts of type I cytokines which reflects their higher activation status compared to 1^{st} generation G36-CD8z CART cells. Specifically, G36-CD28z CART cells secreted 6.5×, 2.3× and 4× more IL-2, IFN and IL-17, respectively than G36-CD8z CART cells. Specificity of cytokine secretion induction by the two G36 CART cells is seen by their minimal stimulation with CAIX− sk-rc-59 cells.

[0217] In an Elispot study, after interaction with CAIX+sk-rc-52 tumors, G36-CD28z CART cells became high capacity IFN- producing cells (FIG. 3B). G36-CD28z CART cells produced 6 times more spots than seen for G36-CD8z CART cells upon interaction with CAIX+ sk-rc 52 tumor cells and 12 times more spots than seen after interaction with CAIX− sk-rc-59 tumor cells. Similarly, G36-CD28z CART cells had a higher amount of granzyme B-secreting spots after contact with CAIX+ tumors as compared with G36-CD8z CART cells and control T cells. PMA and ionomycin stimulated T cells yielded the highest amount of IFN- and granzyme B secreting T cells. These studies demonstrate both specificity and high capacity of G36-CD28z CART cells to be activated by contact with CAIX+ tumor cells.

### Example 4: Specific Cytotoxicity Via Car Signaling in Transduced T Cells

[0218] An in vitro cytotoxicity assay was established to further evaluate the killing activity of the different G36 CART cells. Using different ratios of effector-to-target, G36-CD28z CART cells and its' twice in vivo passaged subclone 4-1 exhibited the highest amount of cytolysis of CAIX+ tumor sk-rc-52 (FIG. 3C). With high ratio of more than 25:1, G36-CD28z CART cells showed 2-3 fold higher cytotoxicity than G36-CD8z CART cells and with low ratio of 5:1, G36-CD28z CART cells showed 8-9 fold higher lysis than G36-CD8z CART cells. However, G36-CD8z CART cells still exhibited good cytotoxicity with up to more than 60% tumor lysis using 100:1 of E:T ratio. Irrelevant A8-CD28z CART cells and control T cell LAK showed the background non-specific tumor lysis with around 20% lysis when using the highest 100:1 of E:T ratio. In all cases of using CAIX− tumor sk-rc-59, transduced and untransduced T cells showed background lysis.

### Example 5: Improved In Vitro Proliferation in Cart Cells with Prolonged Caix+ Tumor

[0219] Besides enhanced cytokine secretion and cytotoxicity on short term CAIX+ tumor cell contact, incorporation of the CD28 costimulatory molecule into the CAR construct demonstrated improved proliferation upon prolonged contact with antigen-specific tumor cells. Untransduced and transduced (around 20%) T cells were mixed with freshly irradiated tumor cells weekly in the presence of 100 units/ml human IL-2. To test the different levels of antigen stimulation to a fixed amount of T cells, we used tumor cell to T cell ratios of 1:8, 1:4 and 1:2. T cell numbers were counted by trypan exclusion and CART cell fractions were examined by flow cytometry. Under culture with CAIX− sk-rc-59 tumor cells, the number of transduced and untransduced T cells was maintained (FIG. 4A bottom). The lack of basal level of proliferation of control T cells might be due to the high amount of suppressive cytokines secreted by the tumor cell line. In contrast, after two weeks of culture with CAIX+ sk-rc-52 tumor cells, at ratio 1:8, the population of G36-CD28z CART cells increased to 30-fold and G36-CD8z CART cells proliferated up to 17-fold whereas at a ratio of 1:4, the number of G36-CD28z CART cells increased 19-fold and G36-CD8z CART cells proliferated 4-fold. With higher amounts of tumor cells, neither G36-CD28z or G36-CD8z CART cells could proliferate. Irrelevant A8-CD28z CART cells and control T cell LAK showed no proliferation with tumor cells (FIG. 4A top).

[0220] Proliferating T cells were also harvested to examine their enrichment on CAIX+ tumor cell contact. On CAIX− tumor contact, there was no change in the percentage of any CART cells within the population. However on contact with CAIX+ sk-rc-52 tumor cells, there was enrichment in both populations of G36 CART cells. For G36-CD28z CART cells, the positive population was enriched from 18% on day 0 to 52% on day 8 to 88% on day 16. Expression of G36-CD8z CART cells was enriched from 19% on day 0 (same levels at T cells only) to 32% on day 8, and to 72% on day 16. No expansion of A8-CD28z CART cells was seen over the two week study (FIG. 4B). The percentage of CD8 cells remained constant throughout the 16 day study under all conditions (FIG. 4C).

### Example 6: Persistent Effector Function of Cart Cells after Re-Contact with Tumor

[0221] Transduced T cells that were in contact with irradiated tumor cells for one or two weeks were also tested for cytokine secretion after 24 hours of contact with fresh non-irradiated tumor cells. Upon contact with CAIX+ tumor (sk-rc-52) for one or two weeks, G36-CD28z and G36-CD8z CART cells showed similar IFN- secretion levels although costimulatory signaling through G36-CD28z CAR yielding 2× to 2.5× more IFN- secretion than seen for G36-CD8z CAR (Table 1). For IL-2 secretion, two weeks of tumor contact for G36-CD28z and G36-CD8z CART cells exhibited more IL-2 secretion than one week of contact. G36-CD28z CART cells yielding 5× more IL2 than G36-CD8z CART cell on one week of contact and 2.5× more on contact for two weeks. In addition, G36-CD28z CART cells in contact with tumor cells for two weeks secreted 3.3× more IL-2 than one time tumor contact whereas G36-CD8z CART gave 6.8× more IL-2 secretion after two weeks compared to after one week of tumor contact. These results indicate that the transduced CART cells did not become exhausted and maintained functional activity after a second tumor stimulation. Only background levels of INF- and IL-2 secretion were seen with A8-CD28z, LAK and G36 CART cell treatments on contact with CAIX− sk-rc59 cells.

### Example 7: Suppression of Established Tumor by Cart Cells

[0222] We next tested CART cells to inhibit established tumor cell growth in nude mice that were inoculated with sk-rc-52 tumor cells on left flank and sk-rc-59 tumor cells on right flank that had been established to yield similar tumor curves. On day 7 after tumor implantation, with typical tumor size of ˜6×6 mm, 50 million G36-CD28z CART cells, A8-CD28z CART cell or untransduced T cells (LAK) were injected intravenously. Adoptive T-cell therapy was performed in two separate experiments with group sizes of n=7 in the first trial and n=8 in the second trial, in the presence of high dose IL-2 (2×10⁵ IU) via intraperitoneal injection. No T-cell treatment was included in order to compare the growth of tumor and the effect of cell-therapy.

[0223] In trial one, treated and untreated CAIX− sk-rc-59 tumors had average size of 6.09 0.02 mm on day 4 and 9.29±0.12 mm on day 25 (within four tested groups). They exhibited the same tumor growth rate in control groups and T-cell treated groups. Untreated CAIX+ tumors that received no T cells showed similar tumor size as CAIX− tumors, with an average size of 6.09±0.13 mm on day 4 and 9.15±0.11 mm on day 25. However, the tumor size of G36-CD28z CART cell treated mice showed statistically significant reduction in size compared to no T-cell treated mice at every time point that was examined over the 25 day study (FIG. 5). G36-CD28z CART treatment also led to a greater reduction in tumor size than seen with A8-CD28z CART cell and LAK treated mice on day 7 (p<0.05) and on day 25 (p<0.001), as calculated by two-tailed t test. In trial two, tumor size of G36-CD28z CART cell treated mice was significant smaller than that of no T-cell treated mice through the 29 day experiment. G36-CD28z CART cell treated mice also had smaller tumors than were seen with A8 CD28z CART cell and LAK treated mice on day 8 to day 26 with p<0.01 and on day 29 with p<0.001 (FIG. 5).

[0224] Partial regression of CAIX+ tumor was considered when the tumor size was smaller than 30% volume of control CAIX− tumor in a same mouse receiving the same T-cell. Partial tumor regression was observed in a high percentage of cases using G36-CD28z CART cells (10 out of 15, (67%)), but only infrequently in irrelevant target A8-CD28z CART cells (1 out of 15, (7%)) and in activated T cell LAKs (2 out of 15, (13%)) (Table 2). Frequency of partial regression response was found to be statistically significant for mice treated with G36-CD28z CART cells versus control A8-CD28z CART cells and LAKs at p<0.001 and p<0.005, respectively by Fisher test.

### Example 8: Insitu Cytotoxicity by Cart Cells

[0225] A sample of the whole population of transduced T cells used for the in vivo study were pre-stained with Far red dye and the CART cells expressing ZsGreen protein within the population were analyzed by confocal microscopy. These results demonstrated circa 30% transduction efficiency which is in agreement with our FACS analysis (FIG. 6A).

[0226] To provide evidence that G36-CD28z CART cell treatment of CAIX+ sk-rc-52 tumor cells in vivo resulted in killing by apoptosis, tumor sections were stained by Tunnel assay. On day 3 after adoptive T cell treatment, Tunnel staining identified apoptotic tumor cells (red) at the edge of tumor (FIG. 6B upper row) and inside the tumor bed (FIG. 6B middle row). The apoptoic tumor cells lost the DAPI nuclear staining. Shown in the enlarged graph (FIG. 6B bottom row) is a ZsGreen expressing CART cell interacting with two tumor cells that were going apoptosis.

[0227] Due to the limitation of fluorescent signal, ZsGreen expressing CART cells could not be observed from the whole tissue section. Therefore on day 3 after G36-CD28z CART cell or LAK treatment, the tumors were harvested and sections were also stained with granzyme B antibody to locate the activated T cells. In FIG. 6C, the dark brown areas of staining show granzyme B+ T cells that are seen infiltrating into the CAIX+ sk-rc-52 tumor sections (FIG. 6C upper left). These granzyme B+ T cells were seen surrounding the tumor (FIG. 6C upper left (a) and middle) and inside the tumor (FIG. 6C upper left (b) and lower). Tumors with necrotic areas were shown in H&E stained slides (labeled as n inside FIG. 6C right middle and lower) and lie at locations near to the granzyme B+ T cells. In contrast, the CAIX+ sk-rc-52 tumors treated with control activated T cells (LAK) (FIG. 7) did not show any granzyme B+ T cells. Similarly, CAIX− sk-rc-59 treated with G36-CD28z CART cells (FIG. 8) or treated with LAK (FIG. 9) showed a low background staining while tumor was proliferating. For positive control of granzyme B staining, CART cells was locally injected into the established sk-rc-52 tumor in mice. After one day, the mice was sacrificed and tumor tissue was sectioned for this staining (FIG. 10).

TABLE 1
Cytokine Secretion After One or Two
Weeks of Contact with Tumor Cells*

| | IFN-γ (pg/ml) | | IL-2 (pg/ml) | |
|---|---|---|---|---|
| CART cells | One week | Two weeks | One week | Two weeks |

RC-SK-52 (CAIX+) Cells

| | | | | |
|---|---|---|---|---|
| G36-CD28z | 25,788 | 28,192 | 7,524 | 24,937 |
| G36-CD8z | 13,096 | 10,961 | 1,470 | 10,029 |
| A8-CD28z | 55 | 55 | 9 | 13 |
| LAK | 68 | 58 | 9 | 13 |

RC-SK-59 (CAIX−) Cells

| | | | | |
|---|---|---|---|---|
| G36-CD28z | 31 | 29 | 5 | 4 |
| G36-CD8z | 27 | 38 | 8 | 10 |
| A8-CD28z | 56 | 55 | 7 | 8 |
| LAK | 49 | 56 | 10 | 8 |

*Transduced T cells were incubated with irradiated tumor cells for one or two weeks then harvested, washed and incubated with fresh non-irradiated tumor cells overnight and supernatants collected after 24 hrs for cytokine analysis. For T cell cultures that did not interact with tumor cells, only background level of cytokines were detected at levels <50 pg/ml IFN- and <10 pg/ml IL-2.

TABLE 2
Frequency of Partial Regression of
CAIX+ Tumors by G36-CD28z CART cells

| Gene construct | LAK | A8-CD28z | G36-CD28z | Statistics |
|---|---|---|---|---|
| Target antigen | none | irrelevant | specific | |
| Co-stimulatory | none | 2 signals | 2 signals | |
| Partial | 2 | 1 | 10 | p < 0.005*; |
| response | | | | p < 0.001** |
| Non-partial | 13 | 14 | 5 | N.S. |
| response | | | | |

Mice from experiments reported in FIG. 5 (experiment 1, n = 7 & experiment 2, n = 8) were scored for response at day 10. Partial response is defined as the regression of tumor to smaller than 30% volume of control tumor (same T-cell treatment in the same mouse bearing left flank of sk-rc-52 and right flank of control tumor sk-rc-59).
Fisher test results-
*G36-CD28z verses LAK;
**G36-CD28z verses A8-CD28z;
N.S.—no statistically significant relationship between number of tumors and partial response between T cells transduced with LAK and with A8-CD28z.

### Example 9: Anti-Carbonic Anhydrase IX Chimeric Antigen Receptor T Cells Releasing Anti-Pd-L1 Antibodies Revert T Cell Exhaustion and Regress Renal Cell Carcinoma in a Humanized Mouse Model

### Characterization of Anti-CAIX CAR T Cells Secreting Anti-PDL1 IgG1 or IgG4

[0228] In order to develop a new CAR therapy for CAIX+ RCC, we engineered a bicistronic lentiviral vector to express the anti-CAIX (G36) scFv linked to CD28 and CD3-ζ signaling domains (G36-CD28z CAR in the first cassette and anti-PD-L1 IgG1 or IgG4 in a second expression cassette after an IRES site (FIG. 16A). The anti-PD-L1 IgG sequence was inserted into the lentiviral vector with the aim to block T-cell exhaustion, which we propose may improve the efficacy of G36-CD28z CART cells (FIG. 16B). As controls, we used an anti-CAIX CAR or anti-BCMA CAR containing an irrelevant anti-SARS IgG1 mAb in the second cassette. The lentiviruses generated from these constructs were transduced into CD8 T cells and cultivated in the presence of IL-21, which yielded CART cells with modestly improved proliferation than was seen with IL-2 (FIGS. 21A and 21B), while maintaining the same specific killing activity for CAIX+ RCC (FIGS. 21C and 21D). The percentage of CAIX and PD-L1 expression in all RCC lineages used in our experiments is shown in the FIG. 22.

[0229] The CART cell functionality is demonstrated in FIG. 23, where CD8 T cells transduced with all CARS were able to proliferate in the presence of IL-21 and anti-CD8/CD28 beads (FIGS. 23A and 23B), achieving transduction levels of 65-90% after four days (FIG. 23C). Fourteen days after transduction, we evaluated the stable long-term expression of CAR by the integrated lentiviruses (FIG. 16C), which was maintained around 25-50% for all CARs. Total IgG levels secreted by CD8 T cells was also determined, ranging around 300-650 ng/mL after 4 days (FIG. 16D). The binding specificity of the anti-PD-L1 IgG1 and IgG4 antibodies for human PD-L1 was also confirmed (FIG. 16E). The levels of biotinylated anti-PDL1 IgG1 and 4 were significantly lower than total IgG, which could be explained by the fact that a portion of the IgG was wasted during the purification process. The ability of anti-CAIX CART cells to undergo clonal expansion in the presence of CAIX+ RCC cells was established (FIGS. 16F and 16G). Anti-CAIX CART cells cannot expand significantly in the presence of CAIX− RCC cells.

[0230] Effector Activity of Anti-CAIX CART Cells. All anti-CAIX CART cells were able to induce around 50-70% decrease in the viability of Skrc59 CAIX+/PD-L1+, indicating that the Anti-PD-L1 IgG1 and IgG4, secreted by some CART cells, did not augment cell death under these assay conditions (FIG. 17A). Anti-CAIX CART cells induced IL-2 and IFNγ release in the presence of CAIX+/PD-L1+ cells, indicating the specific activation of anti-CAIX CART cells (FIGS. 17C and 17E, respectively). Regarding the anti-CAIX CART cells secreting anti-PD-L1 IgGs, the unique differential effect was seen for the IgG1 isoform, which was able to induce around 60% of ADCC in CAIX+/PD-L1+RCC cells when incubated with natural killer cells (NK) (FIG. 17G). No effect in cell viability, cytokines secretion or ADCC was detected for any of the CART cells in the presence of CAIX−/PD-L1− cells (FIGS. 17B, 17D, 17F and 17H).

[0231] Anti-CAIX CART cells-secreting anti-PD-L1 antibodies can diminish T cell exhaustion in vitro. A circa 50% decrease in the exhaustion markers Lag-3, Tim3 and PD-1 was found in the anti-PD-L1 IgG1 and IgG4 anti-CAIX CART groups (FIGS. 18A, 18B and 18C, respectively) after induction of exhaustion compared to the parental anti-CAIX or irrelevant anti-BCMA CART cells. At this point, the killing activity of anti-CAIX CART cells without anti-PD-L1 was retested over Skrc59 CAIX+/PD-L1+ cells. As can be seen in FIG. 18D, the anti-CAIX CART cells had lost their killing activity against CAIX+/PD-L1+ RCC in vitro to a level that was similar to the irrelevant CAR group, establishing that the anti-CAIX CART cells became anergic. In contract, the RCC viability diminished 25-50% for the anti-CAIX CAR anti-PD-L1 IgG1 and IgG4 CART groups, thereby providing evidence that the checkpoint blockade elicited by the presence of sectreted anti-PD-L1 IgGs can lead to diminished T cell exhaustion.

[0232] Anti-CAIX CART cells secreting anti-PD-L1 antibodies can further decrease tumor growth in an orthotopic mouse model of human RCC. NSG mice were used to establish an orthotopic RCC model by injecting Skrc-59 CAIX+PD-L1+luciferase+ positive RCC cells under the kidney capsule followed by i.v. injection of 1.0×107 CART or untransduced T cells (Day 0) and repeat treatment on Day 17 with a lower dose (2.5×10⁶) of the same cells. We did not treat the mice with systemic IL-2 to maintain the proliferation of CART cells to avoid the bias that this molecule could exert over the tumor growth. The data in FIGS. 19A-19C demonstrate that all three anti-CAIX CART cell groups showed decreased RCC growth compared to irrelevant anti-BCMA CART cells or untransduced cells over the course of the experiment with the marked anti-tumor effects of the anti-CAEX CART cells secreting anti-PD-L1 IgG1 or IgG4 becoming evidence at day 23 and 30 (FIGS. 19A and 19B). However, even one week after i.v. treatment with CART cells, we observed that the tumors were 2-3 times smaller in the anti-PD-L1-secreting CART cells when compared with parental anti-CAIX CART cells and the two control groups (FIG. 24A). We also analyzed CD45+ T cell survival in the mouse blood to gauge their survival in this passive transfer model. At Day 8 we observed that the amount of human T cells within the PBMCs was only 10-15% (FIG. 24B) and for this reason we decided to expand the CART cells in vitro to perform a second injection into the mail blood at Day 17. One week after the second injection (Day 23) the anti-PD-L1 IgG1 and IgG4 groups had tumors 15 times smaller than the control groups and 5 times smaller than the anti-CAIX CAR T cells without anti-PD-L1 secretion (FIG. 19C and FIG. 24A). At day 30, the group of mice treated with CART cells-secreting anti-PD-L1 antibody had tumors 5 times smaller than the control groups (FIG. 19C and FIG. 24A). The excised tumors weights were also lower from the mice treated CART cells-secreting anti-PD-L1 antibody and that was particularly evident for the anti-PDL1 IgG4 antibody group (FIGS. 19B and 19D).

[0233] Analysis of CART cell tumor infiltrates and evidence that anti-CAIX CART cells secreting anti-PD-L1 antibodies can lead to reversal of T cell exhaustion. Analysis in the excised tumors showed around 10% of TIL in all groups (FIG. 24C)

[0234] One of the most important effects observed with the anti-CAIX CART cells secreting anti-PD-L1 IgG1 or IgG4 antibodies in vivo was their ability to decrease the expression of the exhaustion markers PD-1, Tim-3 and Lag-3. As shown in FIG. 20A, we observed a circa 40-50% decrease in the expression of these markers in the TIL's when compared with the treatment using untransduced control cells at the Day 30 There was also a circa 30-70% decrease compared to anti-CAIX CAR cells That were not secreting anti-PDL-1 antibodies thereby providing evidence that the locally secreted antibodies had an effect on decreasing T cell exhaustion.

[0235] The effector activity of CART cells and their influence over RCC proliferation in vivo was evaluated by the immunohistochemical detection of granzyme B in the TIL, the tumor proliferation marker Ki67 and the tumor immunosuppressive protein PD-L1 (FIGS. 20B and 20C). The granzyme B staining showed the effector activity of CD8+ cells, especially in the RCC tumors treated with the anti-CAIX CART cells secreting anti-PD-L1 IgG4, which presented an augmented percentage of high positive stained cells (FIGS. 20B and 20C). PD-L1 expression decreased dramatically in the tumors treated with Antianti-CAIX CART cells, being more expressive in the Anti-CAIX/Anti-PD-L1 IgG-secreting groups (FIGS. 20B and 20C). Ki67 expression decreased significantly in the Anti-CAIX/Anti-PD-L1 IgG-secreting groups, as we can visualize in the total DAB pixel count graph, however when the intensity among the positive nuclei staining (Ki67 IHC quantification graph) was evaluated, we can note that the Anti-CAIX/Anti-PD-L1 IgG4 presented the lowest intensity of Ki67 expression (FIGS. 20B and 20C). For the quantification of nuclear proteins, like Ki67, DAB staining pattern is confined to the nuclei, and the threshold feature of ImageJ should be used to select the positive stained areas for quantification. For this reason, there are no negative cells in the Ki67 IHC quantification graph (FIG. 20C) and DAB pixel count were also shown for evaluation of total Ki67 staining, including negative cells (FIG. 20C).

[0236] Anti-CAIX CART cells secreting anti-PD-L1 IgG1 antibodies can recruit NK cells to the tumor. The tumors of the mice treated with Anti-CAIX/Anti-PD-L1 IgG1 that received an injection of NK cells 2 days before the euthanasia showed the presence of 40% more NK cells inside the tumor, when compared with Anti-BCMA/Anti-SARS IgG1, as detected by Anti-CD56 staining by FACS (FIG. 25A). The increase in NK cells in the Anti-CAIX/Anti-PD-L1 IgG1 group was also detected and quantified by IHC (FIG. 25B). Very few NK cells were also detected in the groups treated with CART cells secreting an unspecific IgG1 Ab.

### Other Embodiments

[0237] While the invention has been described in conjunction with the detailed description thereof, the foregoing description is intended to illustrate and not limit the scope of the invention, which is defined by the scope of the appended claims. Other aspects, advantages, and modifications are within the scope of the following claims.

### REFERENCES

[0238] 1. Ivanov S, Liao S Y, Ivanova A, Danilkovitch-Miagkova A, Tarasova N, Weirich G et al. Expression of hypoxia-inducible cell-surface transmembrane carbonic anhydrases in human cancer. Am J Pathol 2001; 158(3): 905-19.
[0239] 2. Loncaster J A, Harris A L, Davidson S E, Logue J P, Hunter R D, Wycoff C C et al. Carbonic anhydrase (CA IX) expression, a potential new intrinsic marker of hypoxia: correlations with tumor oxygen measurements and prognosis in locally advanced carcinoma of the cervix. Cancer research 2001; 61(17): 6394-9.
[0240] 3. Hilvo M, Baranauskiene L, Salzano A M, Scaloni A, Matulis D, Innocenti A et al. Biochemical characterization of CA IX, one of the most active carbonic anhydrase isozymes. J Biol Chem 2008; 283(41): 27799-809.
[0241] 4. Oosterwijk E, Ruiter D J, Hoedemaeker P J, Pauwels E K, Jonas U, Zwartendijk J et al. Monoclonal antibody G 250 recognizes a determinant present in renal-cell carcinoma and absent from normal kidney. International journal of cancer. Journal international du cancer 1986; 38(4): 489-94.
[0242] 5. Liao S Y, Brewer C, Zavada J, Pastorek J, Pastorekova S, Manetta A et al. Identification of the MN antigen as a diagnostic biomarker of cervical intraepithelial squamous and glandular neoplasia and cervical carcinomas. Am J Pathol 1994; 145(3): 598-609.
[0243] 6. Liao S Y, Aurelio O N, Jan K, Zavada J, Stanbridge E J. Identification of the MN/CA9 protein as a reliable diagnostic biomarker of clear cell carcinoma of the kidney. Cancer research 1997; 57(14): 2827-31.
[0244] 7. Atkins M, Regan M, McDermott D, Mier J, Stanbridge E, Youmans A et al. Carbonic anhydrase IX expression predicts outcome of interleukin 2 therapy for renal cancer. Clin Cancer Res 2005; 11(10): 3714-21.
[0245] 8. Lokich J. Spontaneous regression of metastatic renal cancer. Case report and literature review. Am J Clin Oncol 1997; 20(4): 416-8.
[0246] 9. Chang A E, Li Q, Jiang G, Sayre D M, Braun™, Redman B G. Phase II trial of autologous tumor vaccination, anti-CD3-activated vaccine-primed lymphocytes, and interleukin-2 in stage IV renal cell cancer. J Clin Oncol 2003; 21(5): 884-90.
[0247] 10. Dudley M E, Wunderlich J R, Robbins P F, Yang J C, Hwu P, Schwartzentruber D J et al. Cancer regression and autoimmunity in patients after clonal repopulation with antitumor lymphocytes. Science 2002; 298(5594): 850-4.
[0248] 11. Schaft N, Willemsen R A, de Vries J, Lankiewicz B, Essers B W, Gratama J W et al. Peptide fine specificity of anti-glycoprotein 100 CTL is preserved following transfer of engineered TCR alpha beta genes into primary human T lymphocytes. J Immunol 2003; 170(4): 2186-94.
[0249] 12. Bubenik J. MHC class I down-regulation: tumour escape from immune surveillance?(review). International journal of oncology 2004; 25(2): 487-91.
[0250] 13. Gajewski T F, Meng Y, Blank C, Brown I, Kacha A, Kline J et al. Immune resistance orchestrated by the tumor microenvironment. Immunological reviews 2006; 213: 131-45.
[0251] 14. Frigola X, Inman B A, Lohse C M, Krco C J, Cheville J C, Thompson R H et al. Identification of a soluble form of B7-H1 that retains immunosuppressive activity and is associated with aggressive renal cell carcinoma. Clin Cancer Res 2011; 17(7): 1915-23.
[0252] 15. Grepin R, Guyot M, Giuliano S, Boncompagni M, Ambrosetti D, Chamorey E et al. The CXCL7/CXCR1/2 axis is a key driver in the growth of clear cell renal cell carcinoma. Cancer research 2014; 74(3): 873-83.
[0253] 16. Sadelain M, Brentjens R, Riviere I. The promise and potential pitfalls of chimeric antigen receptors. Curr Opin Immunol 2009; 21(2): 215-23.
[0254] 17. Lamers C H, Sleijfer S, van Steenbergen S, van Elzakker P, van Krimpen B, Groot C et al. Treatment of metastatic renal cell carcinoma with CAIX CAR-engineered T cells: clinical evaluation and management of on-target toxicity. Molecular therapy: the journal of the American Society of Gene Therapy 2013; 21(4): 904-12.
[0255] 18. Milone M C, Fish J D, Carpenito C, Carroll R G, Binder G K, Teachey D et al. Chimeric receptors containing CD137 signal transduction domains mediate enhanced survival of T cells and increased antileukemic efficacy in vivo. Molecular therapy: the journal of the American Society of Gene Therapy 2009; 17(8): 1453-64.
[0256] 19. Wilkie S, Picco G, Foster J, Davies D M, Julien S, Cooper L et al. Retargeting of human T cells to tumor-associated MUC1: the evolution of a chimeric antigen receptor. J Immunol 2008; 180(7): 4901-9.
[0257] 20. Lo A S, Ma Q, Liu D L, Junghans R P. Anti-GD3 chimeric sFv-CD28/T-cell receptor zeta designer T cells for treatment of metastatic melanoma and other neuroectodermal tumors. Clin Cancer Res 2010; 16(10): 2769-80.
[0258] 21. Kalos M, Levine B L, Porter D L, Katz S, Grupp S A, Bagg A et al. T cells with chimeric antigen receptors have potent antitumor effects and can establish memory in patients with advanced leukemia. Science translational medicine 2011; 3(95): 95ra73.
[0259] 22. Pegram H J, Park J H, Brentjens R J. CD28z CARs and armored CARs. Cancer J 2014; 20(2): 127-33.
[0260] 23. Xu C, Lo A, Yammanuru A, Tallarico A S, Brady K, Murakami A et al. Unique biological properties of catalytic domain directed human anti-CAIX antibodies discovered through phage-display technology. PloS one 2010; 5(3): e9625.
[0261] 24. Sui J, Aird D R, Tamin A, Murakami A, Yan M, Yammanuru A et al. Broadening of neutralization activity to directly block a dominant antibody-driven SARS-coronavirus evolution pathway. PLoS pathogens 2008; 4(11): e1000197.
[0262] 25. Mirzabekov T, Kontos H, Farzan M, Marasco W, Sodroski J. Paramagnetic proteoliposomes containing a pure, native, and oriented seven-transmembrane segment protein, CCR5. Nat Biotechnol 2000; 18(6): 649-54.
[0263] 26. Wald O, Weiss I D, Wald H, Shoham H, Bar-Shavit Y, Beider K et al. IFN-gamma acts on T cells to induce NK cell mobilization and accumulation in target organs. J Immunol 2006; 176(8): 4716-29.

[0264] 27. Zeytin H, Reali E, Zaharoff D A, Rogers C J, Schlom J, Greiner J W. Targeted delivery of murine IFN-gamma using a recombinant fowlpox virus: NK cell recruitment to regional lymph nodes and priming of tumor-specific host immunity. Journal of interferon & cytokine research: the official journal of the International Society for Interferon and Cytokine Research 2008; 28(2): 73-87.
[0265] 28. Murugaiyan G, Saha B. Protumor vs antitumor functions of IL-17. J Immunol 2009; 183(7): 4169-75.
[0266] 29. Bar E, Whitney P G, Moor K, Reis e Sousa C, LeibundGut-Landmann S. IL-17 regulates systemic fungal immunity by controlling the functional competence of NK cells. Immunity 2014; 40(1): 117-27.
[0267] 30. Hinrichs C S, Kaiser A, Paulos C M, Cassard L, Sanchez-Perez L, Heemskerk B et al. Type 17 CD8+ T cells display enhanced antitumor immunity. Blood 2009; 114(3): 596-9.
[0268] 31. Hombach A A, Rappl G, Abken H. Arming cytokine-induced killer cells with chimeric antigen receptors: CD28 outperforms combined CD28-OX40 “super-stimulation”. Molecular therapy: the journal of the American Society of Gene Therapy 2013; 21(12): 2268-77.
[0269] 32. Mor F, Cohen I R. IL-2 rescues antigen-specific T cells from radiation or dexamethasone-induced apoptosis. Correlation with induction of Bcl-2. J Immunol 1996; 156(2): 515-22.
[0270] 33. Isakov N, Altman A. PKC-theta-mediated signal delivery from the TCR/CD28 surface receptors. Frontiers in immunology 2012; 3: 273.
[0271] 34. Loskog A, Giandomenico V, Rossig C, Pule M, Dotti G, Brenner M K. Addition of the CD28 signaling domain to chimeric T-cell receptors enhances chimeric T-cell resistance to T regulatory cells. Leukemia 2006; 20(10): 1819-28.
[0272] 35. Schwarzer A, Wolf B, Fisher J L, Schwaab T, Olek S, Baron U et al. Regulatory T-cells and associated pathways in metastatic renal cell carcinoma (mRCC) patients undergoing DC-vaccination and cytokine-therapy. PloS one 2012; 7(10): e46600.
[0273] 36. Lamers C H, Willemsen R, van Elzakker P, van Steenbergen-Langeveld S, Broertjes M, Oosterwijk-Wakka J et al. Immune responses to transgene and retroviral vector in patients treated with ex vivo-engineered T cells. Blood 2011; 117(1): 72-82.
[0274] 37. Miotti S, Negri D R, Valota O, Calabrese M, Bolhuis R L, Gratama J W et al. Level of anti-mouse-antibody response induced by bi-specific monoclonal antibody OC/TR in ovarian-carcinoma patients is associated with longer survival. International journal of cancer. Journal international du cancer 1999; 84(1): 62-8.
[0275] 38. Kershaw M H, Westwood J A, Parker L L, Wang G, Eshhar Z, Mavroukakis S A et al. A phase I study on adoptive immunotherapy using gene-modified T cells for ovarian cancer. Clin Cancer Res 2006; 12(20 Pt 1): 6106-15.
[0276] 39. Pastorekova S. Carbonic anhydrase IX (CA IX) as a potential target for cancer therapy. Cancer Therapy 2004; 2: 245-262.
[0277] 40. Pastorekova S, Parkkila S, Parkkila A K, Opavsky R, Zelnik V, Saarnio J et al. Carbonic anhydrase IX, MN/CA IX: analysis of stomach complementary DNA sequence and expression in human and rat alimentary tracts. Gastroenterology 1997; 112(2): 398-408.
[0278] 41. Saarnio J, Parkkila S, Parkkila A K, Waheed A, Casey M C, Zhou X Y et al. Immunohistochemistry of carbonic anhydrase isozyme IX (MN/CA IX) in human gut reveals polarized expression in the epithelial cells with the highest proliferative capacity. The journal of histochemistry and cytochemistry: official journal of the Histochemistry Society 1998; 46(4): 497-504.
[0279] 42. Zavada J, Zavadova Z, Zat'ovicova M, Hyrsl L, Kawaciuk I. Soluble form of carbonic anhydrase IX (CA IX) in the serum and urine of renal carcinoma patients. Br J Cancer 2003; 89(6): 1067-71.
[0280] 43. Hombach A, Koch D, Sircar R, Heuser C, Diehl V, Kruis W et al. A chimeric receptor that selectively targets membrane-bound carcinoembryonic antigen (mCEA) in the presence of soluble CEA. Gene Ther 1999; 6(2): 300-4.
[0281] 44. Carpenito C, Milone M C, Hassan R, Simonet J C, Lakhal M, Suhoski M M et al. Control of large, established tumor xenografts with genetically retargeted human T cells containing CD28 and CD 137 domains. Proceedings of the National Academy of Sciences of the United States of America 2009; 106(9): 3360-5.
[0282] 45. Gill S, Tasian S K, Ruella M, Shestova O, Li Y, Porter D L et al. Efficacy against human acute myeloid leukemia and myeloablation of normal hematopoiesis in a mouse model using chimeric antigen receptor-modified T cells. Blood 2014.
[0283] 46. Hombach A A, Heiders J, Foppe M, Chmielewski M, Abken H. OX40 costimulation by a chimeric antigen receptor abrogates CD28 and IL-2 induced IL-10 secretion by redirected CD4(+) T cells. Oncoimmunology 2012; 1(4): 458-466.
[0284] 47. Song D G, Ye Q, Carpenito C, Poussin M, Wang L P, Ji C et al. In vivo persistence, tumor localization, and antitumor activity of CAR-engineered T cells is enhanced by costimulatory signaling through CD137 (4-1BB). Cancer research 2011; 71(13): 4617-27.
[0285] 48. Bedke J, Stenzl A. Immunotherapeutic strategies for the treatment of renal cell carcinoma: where are we now?Expert review of anticancer therapy 2013; 13(12): 1399-408.
[0286] 49. Bailey A, McDermott D F. Immune checkpoint inhibitors as novel targets for renal cell carcinoma therapeutics. Cancer J 2013; 19(4): 348-52.
[0287] 50. Maher J, Brentjens R J, Gunset G, Riviere I, Sadelain M. Human T-lymphocyte cytotoxicity and proliferation directed by a single chimeric TCRzeta/CD28 receptor. Nat Biotechnol 2002; 20(1): 70-5.
[0288] 51. Ferlay J, Soerjomataram I, Dikshit R, Eser S, Mathers C, Rebelo M, et al. Cancer incidence and mortality worldwide: sources, methods and major patterns in GLOBOCAN 2012. International journal of cancer. 2015; 136:E359-86.
[0289] 52. Dutcher J P. Recent developments in the treatment of renal cell carcinoma. Therapeutic advances in urology. 2013; 5:338-53.
[0290] 53. Cohen H T, McGovern F J. Renal-cell carcinoma. The New England journal of medicine. 2005; 353:2477-90.
[0291] 54. Sedlakova O, Svastova E, Takacova M, Kopacek J, Pastorek J, Pastorekova S. Carbonic anhydrase IX, a hypoxia-induced catalytic component of the pH regulating machinery in tumors. Frontiers in physiology. 2014; 4:400.
[0292] 55. Benej M, Pastorekova S, Pastorek J. Carbonic anhydrase IX: regulation and role in cancer. Sub-cellular biochemistry. 2014; 75:199-219.
[0293] 56. Tostain J, Li G, Gentil-Perret A, Gigante M. Carbonic anhydrase 9 in clear cell renal cell carcinoma: a marker for diagnosis, prognosis and treatment. European journal of cancer. 2010; 46:3141-8.
[0294] 57. Genega E M, Ghebremichael M, Najarian R, Fu Y, Wang Y, Argani P, et al. Carbonic anhydrase IX expression in renal neoplasms: correlation with tumor type and grade. American journal of clinical pathology. 2010; 134:873-9.
[0295] 58. Alegre M L, Frauwirth K A, Thompson C B. T-cell regulation by CD28 and CTLA-4. Nature reviews Immunology. 2001; 1:220-8.
[0296] 59. Pardoll D M. The blockade of immune checkpoints in cancer immunotherapy. Nature reviews Cancer. 2012; 12:252-64.
[0297] 60. Harshman L C, Drake C G, Choueiri T K. PD-1 blockade in renal cell carcinoma: to equilibrium and beyond. Cancer immunology research. 2014; 2:1132-41.
[0298] 61. Srivastava S, Riddell S R. Engineering CAR-T cells: Design concepts. Trends in immunology. 2015; 36:494-502.
[0299] 62. Maude S L, Frey N, Shaw P A, Aplene R, Barrett D M, Bunin N J, et al. Chimeric antigen receptor T cells for sustained remissions in leukemia. The New England journal of medicine. 2014; 371:1507-17.
[0300] 63. Zhu Y, Tan Y, Ou R, Zhong Q, Zheng L, Du Y, et al. Anti-CD19 chimeric antigen receptor-modified T cells for B-cell malignancies: a systematic review of efficacy and safety in clinical trials. European journal of haematology. 2015.
[0301] 64. Kakarla S, Gottschalk S. CAR T cells for solid tumors: armed and ready to go?Cancer journal. 2014; 20:151-5.
[0302] 65. Lo A S, Xu C, Murakami A, Marasco W A. Regression of established renal cell carcinoma in nude mice using lentivirus-transduced human T-cells expressing a human anti-CAIX chimeric antigen receptor. Molecular Therapy—Oncolytics. 2014; 1:1-12.
[0303] 66. Hsu C Y, Uludag H. A simple and rapid nonviral approach to efficiently transfect primary tissue-derived cells using polyethylenimine. Nature protocols. 2012; 7:935-45.
[0304] 67. Singh H, Figliola M J, Dawson M J, Huls H, Olivares S, Switzer K, et al. Reprogramming CD19-specific T cells with IL-21 signaling can improve adoptive immunotherapy of B-lineage malignancies. Cancer research. 2011; 71:3516-27.
[0305] 68. June C, Rosenberg S A, Sadelain M, Weber J S. T-cell therapy at the threshold. Nature biotechnology. 2012; 30:611-4.
[0306] 69. Chang D K, Moniz R J, Xu Z, Sun J, Signoretti S, Zhu Q, et al. Human anti-CAIX antibodies mediate immune cell inhibition of renal cell carcinoma in vitro and in a humanized mouse model in vivo. Molecular cancer. 2015; 14:119.
[0307] 70. Kaka A S, Shaffer D R, Hartmaier R, Leen A M, Lu A, Bear A, et al. Genetic modification of T cells with IL-21 enhances antigen presentation and generation of central memory tumor-specific cytotoxic T-lymphocytes. Journal of immunotherapy. 2009; 32:726-36.
[0308] 71. Li Y, Bleakley M, Yee C. IL-21 influences the frequency, phenotype, and affinity of the antigen-specific CD8 T cell response. Journal of immunology. 2005; 175:2261-9.
[0309] 72. van der Stegen S J, Hamieh M, Sadelain M. The pharmacology of second-generation chimeric antigen receptors. Nature reviews Drug discovery. 2015; 14:499-509.
[0310] 73. Long A H, Haso W M, Shern J F, Wanhainen K M, Murgai M, Ingaramo M, et al. 4-1BB costimulation ameliorates T cell exhaustion induced by tonic signaling of chimeric antigen receptors. Nature medicine. 2015; 21:581-90.
[0311] 74. Lee D W, Kochenderfer J N, Stetler-Stevenson M, Cui Y K, Delbrook C, Feldman S A, et al. T cells expressing CD19 chimeric antigen receptors for acute lymphoblastic leukaemia in children and young adults: a phase 1 dose-escalation trial. Lancet. 2015; 385:517-28.
[0312] 75. Virgin H W, Wherry E J, Ahmed R. Redefining chronic viral infection. Cell. 2009; 138:30-50.
[0313] 76. Wherry E J. T cell exhaustion. Nature immunology. 2011; 12:492-9.
[0314] 77. Topalian S L, Hodi F S, Brahmer J R, Gettinger S N, Smith D C, McDermott D F, et al. Safety, activity, and immune correlates of anti-PD-1 antibody in cancer. The New England journal of medicine. 2012; 366:2443-54.
[0315] 78. Brahmer J R, Tykodi S S, Chow L Q, Hwu W J, Topalian S L, Hwu P, et al. Safety and activity of anti-PD-L1 antibody in patients with advanced cancer. The New England journal of medicine. 2012; 366:2455-65.
[0316] 79. John L B, Devaud C, Duong C P, Yong C S, Beavis P A, Haynes N M, et al. Anti-PD-1 antibody therapy potently enhances the eradication of established tumors by gene-modified T cells. Clinical cancer research: an official journal of the American Association for Cancer Research. 2013; 19:5636-46.

The application's sequence listing, which the Patent Office published only in electronic form, follows.

SEQUENCE LISTING (1686 sequences)

SEQ ID NO: 1 - protein, 8 aa, synthetic construct
GGPFSSYA

SEQ ID NO: 2 - protein, 8 aa, synthetic construct
GGIFSSYA

SEQ ID NO: 3 - protein, 8 aa, synthetic construct
GGTFSSYA

SEQ ID NO: 4 - protein, 8 aa, synthetic construct
GVTFSSYA

SEQ ID NO: 5 - protein, 8 aa, synthetic construct
GVTFSSYA

SEQ ID NO: 6 - protein, 8 aa, synthetic construct
GVTFSSYA

SEQ ID NO: 7 - protein, 8 aa, synthetic construct
GGTFSSYA

SEQ ID NO: 8 - protein, 8 aa, synthetic construct
GGTFSSYA

SEQ ID NO: 9 - protein, 8 aa, synthetic construct
GGTFSSYA

SEQ ID NO: 10 - protein, 8 aa, synthetic construct
GVTFSSYA

SEQ ID NO: 11 - protein, 8 aa, synthetic construct
GVTFRSYA

SEQ ID NO: 12 - protein, 8 aa, synthetic construct
GGTFSSYA

SEQ ID NO: 13 - protein, 8 aa, synthetic construct
GGPFSSYA

SEQ ID NO: 14 - protein, 8 aa, synthetic construct
GGTFSSYA

SEQ ID NO: 15 - protein, 8 aa, synthetic construct
GGTFSSYA

SEQ ID NO: 16 - protein, 8 aa, synthetic construct
GVTFSSYA

SEQ ID NO: 17 - protein, 8 aa, synthetic construct
GVTFSSYA

SEQ ID NO: 18 - protein, 8 aa, synthetic construct
GVTFSSYA

SEQ ID NO: 19 - protein, 8 aa, synthetic construct
GGPFSSYA

SEQ ID NO: 20 - protein, 8 aa, synthetic construct
GGPFSSYA

SEQ ID NO: 21 - protein, 8 aa, synthetic construct
GVTFSSYA

SEQ ID NO: 22 - protein, 8 aa, synthetic construct
GGTFSSYA

SEQ ID NO: 23 - protein, 8 aa, synthetic construct
GGTFSSYA

SEQ ID NO: 24 - protein, 8 aa, synthetic construct
GVTFSSYA

SEQ ID NO: 25 - protein, 8 aa, synthetic construct
GVTFSSYA

SEQ ID NO: 26 - protein, 8 aa, synthetic construct
GVTFSSYA

SEQ ID NO: 27 - protein, 8 aa, synthetic construct
GGTFSSYA

SEQ ID NO: 28 - protein, 8 aa, synthetic construct
GGIFSSYA

SEQ ID NO: 29 - protein, 8 aa, synthetic construct
GGTFSSYA

SEQ ID NO: 30 - protein, 8 aa, synthetic construct
GGTFSSYA

SEQ ID NO: 31 - protein, 8 aa, synthetic construct
GGTFSSYA

SEQ ID NO: 32 - protein, 8 aa, synthetic construct
GGTFSSYA

SEQ ID NO: 33 - protein, 8 aa, synthetic construct
GGTFSSYA

SEQ ID NO: 34 - protein, 8 aa, synthetic construct
GVTFRSYA

SEQ ID NO: 35 - protein, 8 aa, synthetic construct
GGTFSSYA

SEQ ID NO: 36 - protein, 8 aa, synthetic construct
GVTFSSYA

SEQ ID NO: 37 - protein, 8 aa, synthetic construct
ISPMFGTA

SEQ ID NO: 38 - protein, 8 aa, synthetic construct
ISPIFGTA

SEQ ID NO: 39 - protein, 8 aa, synthetic construct
ISPIFGTA

SEQ ID NO: 40 - protein, 8 aa, synthetic construct
ISPIFGTA

SEQ ID NO: 41 - protein, 8 aa, synthetic construct
IMPMFGTA

SEQ ID NO: 42 - protein, 8 aa, synthetic construct
ISPLFGTA

SEQ ID NO: 43 - protein, 8 aa, synthetic construct
ISPIFGTA

SEQ ID NO: 44 - protein, 8 aa, synthetic construct
ISPIFGTA

SEQ ID NO: 45 - protein, 8 aa, synthetic construct
ISPMFGTA

SEQ ID NO: 46 - protein, 8 aa, synthetic construct
ISPIFGTA

SEQ ID NO: 47 - protein, 8 aa, synthetic construct
ISGIFGTA

SEQ ID NO: 48 - protein, 8 aa, synthetic construct
ISPMFGTA

SEQ ID NO: 49 - protein, 8 aa, synthetic construct
ISGIFGTA

SEQ ID NO: 50 - protein, 8 aa, synthetic construct
ISPIFGTA

SEQ ID NO: 51 - protein, 8 aa, synthetic construct
ISPIFGTA

SEQ ID NO: 52 - protein, 8 aa, synthetic construct
ISPMFGTA

SEQ ID NO: 53 - protein, 8 aa, synthetic construct
ITPMFGTA

SEQ ID NO: 54 - protein, 8 aa, synthetic construct
ISPLFGTA

SEQ ID NO: 55 - protein, 8 aa, synthetic construct
ISPMFGTA

SEQ ID NO: 56 - protein, 8 aa, synthetic construct
ISPLFGTA

SEQ ID NO: 57 - protein, 8 aa, synthetic construct
ISPMFGTA

SEQ ID NO: 58 - protein, 8 aa, synthetic construct
ISPLFGTA

SEQ ID NO: 59 - protein, 8 aa, synthetic construct
ISPIFGTA

SEQ ID NO: 60 - protein, 8 aa, synthetic construct
ISPIFGTA

SEQ ID NO: 61 - protein, 8 aa, synthetic construct
ISPLFGTA

SEQ ID NO: 62 - protein, 8 aa, synthetic construct
ISPIFGTA

SEQ ID NO: 63 - protein, 8 aa, synthetic construct
ISPMFGTA

SEQ ID NO: 64 - protein, 8 aa, synthetic construct
ISPIFGTA

SEQ ID NO: 65 - protein, 8 aa, synthetic construct
ITPIFGTA

SEQ ID NO: 66 - protein, 8 aa, synthetic construct
ISPIFGTA

SEQ ID NO: 67 - protein, 8 aa, synthetic construct
IIPIFGTA

SEQ ID NO: 68 - protein, 8 aa, synthetic construct
ITPMFGTA

SEQ ID NO: 69 - protein, 8 aa, synthetic construct
ISAMFGTA

SEQ ID NO: 70 - protein, 8 aa, synthetic construct
IIPIFGTA

SEQ ID NO: 71 - protein, 8 aa, synthetic construct
ITPMFGTA

SEQ ID NO: 72 - protein, 8 aa, synthetic construct
ISPMFGTA

SEQ ID NO: 73 - protein, 17 aa, synthetic construct
ARDDGYAPSGGLREFDV

SEQ ID NO: 74 - protein, 14 aa, synthetic construct
ARGRGAYMGPSMDV

SEQ ID NO: 75 - protein, 14 aa, synthetic construct
ARGARYYAGGYFDV

SEQ ID NO: 76 - protein, 18 aa, synthetic construct
ARDSGNYDGYGPGSRFDV

SEQ ID NO: 77 - protein, 14 aa, synthetic construct
ARERGSWSFGYFDV

SEQ ID NO: 78 - protein, 14 aa, synthetic construct
ARSRTYADGRTFDV

SEQ ID NO: 79 - protein, 17 aa, synthetic construct
ARELGYLAGSPSPGFDY

SEQ ID NO: 80 - protein, 14 aa, synthetic construct
ARSRRYWADGGFDY

SEQ ID NO: 81 - protein, 15 aa, synthetic construct
AREGGYSPGGVDFDY

SEQ ID NO: 82 - protein, 14 aa, synthetic construct
ARGTTYSTARYFDV

SEQ ID NO: 83 - protein, 14 aa, synthetic construct
ARSPAYYFGPNMDV

SEQ ID NO: 84 - protein, 16 aa, synthetic construct
ARSSRYAPSDSTNFDQ

SEQ ID NO: 85 - protein, 14 aa, synthetic construct
ARGDRFYVGERFDV

SEQ ID NO: 86 - protein, 18 aa, synthetic construct
ARGGGVGRIWIAGYGFDQ

SEQ ID NO: 87 - protein, 18 aa, synthetic construct
ARGPGYHPAGASGQFFDL

SEQ ID NO: 88 - protein, 16 aa, synthetic construct
ARGRGYAPDALTNFDV

SEQ ID NO: 89 - protein, 15 aa, synthetic construct
ARGRGYIAVAGDMDV

SEQ ID NO: 90 - protein, 17 aa, synthetic construct
ARGDAYYVGGGARPFDL

SEQ ID NO: 91 - protein, 18 aa, synthetic construct
ARGYSYYPGGGGGRNFDY

SEQ ID NO: 92 - protein, 17 aa, synthetic construct
ARAPTYYASRDSYNFDY

SEQ ID NO: 93 - protein, 14 aa, synthetic construct
ARDTTYIAGGHFDV

SEQ ID NO: 94 - protein, 15 aa, synthetic construct
ARASGYFTGWGTFDY

SEQ ID NO: 95 - protein, 14 aa, synthetic construct
ARGRYYYTVGVYDV

SEQ ID NO: 96 - protein, 20 aa, synthetic construct
ARGGGYSADGGAGNNTIFDV

SEQ ID NO: 97 - protein, 15 aa, synthetic construct
ARERGYTVGGGGMDV

SEQ ID NO: 98 - protein, 17 aa, synthetic construct
AREYLGDDYSSGSYFDV

SEQ ID NO: 99 - protein, 14 aa, synthetic construct
ARESGYSGTGQFDV

SEQ ID NO: 100 - protein, 15 aa, synthetic construct
ARSGGYYDYGVGYDQ

SEQ ID NO: 101 - protein, 15 aa, synthetic construct
ARSGGYSPSIGGFDV

SEQ ID NO: 102 - protein, 16 aa, synthetic construct
ARGPGYDPSSLRGFDV

SEQ ID NO: 103 - protein, 10 aa, synthetic construct
ARGEEAYYDL

SEQ ID NO: 104 - protein, 15 aa, synthetic construct
ARGTSYLPGRSGFDV

SEQ ID NO: 105 - protein, 15 aa, synthetic construct
ARGRGYDPSVGGFDV

SEQ ID NO: 106 - protein, 20 aa, synthetic construct
ARDSTPSVTSSLYRIPAFDV

SEQ ID NO: 107 - protein, 15 aa, synthetic construct
ARGPGYYPDSNNYDL

SEQ ID NO: 108 - protein, 15 aa, synthetic construct
ARGGTYSPGGTYFDV

SEQ ID NO: 109 - protein, 12 aa, synthetic construct
RSVLYSSNNKNY

SEQ ID NO: 110 - protein, 6 aa, synthetic construct
NIGSKS

SEQ ID NO: 111 - protein, 6 aa, synthetic construct
QTVSNY

SEQ ID NO: 112 - protein, 8 aa, synthetic construct
SSNIGSNT

SEQ ID NO: 113 - protein, 6 aa, synthetic construct
HIGSKS

SEQ ID NO: 114 - protein, 9 aa, synthetic construct
SSDVGGYNH

SEQ ID NO: 115 - protein, 9 aa, synthetic construct
SSDVGGYNY

SEQ ID NO: 116 - protein, 8 aa, synthetic construct
SSNMGRNT

SEQ ID NO: 117 - protein, 8 aa, synthetic construct
SGSIASTY

SEQ ID NO: 118 - protein, 8 aa, synthetic construct
SGSIASNY

SEQ ID NO: 119 - protein, 9 aa, synthetic construct
SSNIGAGYD

SEQ ID NO: 120 - protein, 8 aa, synthetic construct
SGSIASNY

SEQ ID NO: 121 - protein, 6 aa, synthetic construct
DIGSKS

SEQ ID NO: 122 - protein, 9 aa, synthetic construct
SGSVSTSNY

SEQ ID NO: 123 - protein, 8 aa, synthetic construct
SNNVGNQG

SEQ ID NO: 124 - protein, 12 aa, synthetic construct
RSLFDSSDNKNY

SEQ ID NO: 125 - protein, 12 aa, synthetic construct
RSVLYSSNNKNY

SEQ ID NO: 126 - protein, 8 aa, synthetic construct
SSNIGVNY

SEQ ID NO: 127 - protein, 8 aa, synthetic construct
SSNIGSNT

SEQ ID NO: 128 - protein, 7 aa, synthetic construct
QSVDRGY

SEQ ID NO: 129 - protein, 9 aa, synthetic construct
SSDIGAYNY

SEQ ID NO: 130 - protein, 6 aa, synthetic construct
ALPKQY

SEQ ID NO: 131 - protein, 8 aa, synthetic construct
SDNVGNQG

SEQ ID NO: 132 - protein, 8 aa, synthetic construct
NNNVGNQG

SEQ ID NO: 133 - protein, 9 aa, synthetic construct
SSDVGAHNF

SEQ ID NO: 134 - protein, 6 aa, synthetic construct
QSVDSH

SEQ ID NO: 135 - protein, 8 aa, synthetic construct
TSNVGRNT

SEQ ID NO: 136 - protein, 8 aa, synthetic construct
RSNIGSNT

SEQ ID NO: 137 - protein, 8 aa, synthetic construct
RSNIGRNT

SEQ ID NO: 138 - protein, 8 aa, synthetic construct
SNNVGNQG

SEQ ID NO: 139 - protein, 6 aa, synthetic construct
QSVSSF

SEQ ID NO: 140 - protein, 6 aa, synthetic construct
ALPKQY

SEQ ID NO: 141 - protein, 8 aa, synthetic construct
SGSIASNY

SEQ ID NO: 142 - protein, 7 aa, synthetic construct
NGPSNYI

SEQ ID NO: 143 - protein, 7 aa, synthetic construct
QSVSSSY

SEQ ID NO: 144 - protein, 8 aa, synthetic construct
SSNIGVSF

SEQ ID NO: 145-177 - skipped (33 entries)

SEQ ID NO: 178 - protein, 7 aa, synthetic construct
LNSDGSH

SEQ ID NO: 179-180 - skipped (2 entries)

SEQ ID NO: 181 - protein, 9 aa, synthetic construct
QQYYSGSWT

SEQ ID NO: 182 - protein, 11 aa, synthetic construct
QVWDRSSDHVV

SEQ ID NO: 183 - protein, 10 aa, synthetic construct
QQYDNLPPVT

SEQ ID NO: 184 - protein, 11 aa, synthetic construct
SAWDDSLGGEV

SEQ ID NO: 185 - protein, 11 aa, synthetic construct
QVWDSSNDHPV

SEQ ID NO: 186 - protein, 10 aa, synthetic construct
TSYAGSNSLV

SEQ ID NO: 187 - protein, 9 aa, synthetic construct
SSYAGGKWV

SEQ ID NO: 188 - protein, 11 aa, synthetic construct
AAWDDSLNGPV

SEQ ID NO: 189 - protein, 9 aa, synthetic construct
QSFDASTLV

SEQ ID NO: 190 - protein, 11 aa, synthetic construct
QSYDSDNHEVI

SEQ ID NO: 191 - protein, 11 aa, synthetic construct
QSYDSSLSVVV

SEQ ID NO: 192 - protein, 10 aa, synthetic construct
QSYDTSNRKV

SEQ ID NO: 193 - protein, 12 aa, synthetic construct
QVWDTNSDPVFV

SEQ ID NO: 194 - protein, 10 aa, synthetic construct
VLYMGSGISM

SEQ ID NO: 195 - protein, 11 aa, synthetic construct
SAWDSSLSAWV

SEQ ID NO: 196 - protein, 11 aa, synthetic construct
QQYFSSPPIFT

SEQ ID NO: 197 - protein, 9 aa, synthetic construct
QQYYSTPPT

SEQ ID NO: 198 - protein, 12 aa, synthetic construct
GVWDDSLNGHWV

SEQ ID NO: 199 - protein, 11 aa, synthetic construct
AAWDDSLKGRV

SEQ ID NO: 200 - protein, 9 aa, synthetic construct
QQYGSSRLS

SEQ ID NO: 201 - protein, 10 aa, synthetic construct
SSYAGSNNVV

SEQ ID NO: 202 - protein, 9 aa, synthetic construct
QAWDSSTAV

SEQ ID NO: 203 - protein, 11 aa, synthetic construct
SAWDSSLTAVV

SEQ ID NO: 204 - protein, 11 aa, synthetic construct
SAWDSSLSAWV

SEQ ID NO: 205 - protein, 11 aa, synthetic construct
AAWDDSLDGPV

SEQ ID NO: 206 - protein, 9 aa, synthetic construct
QQRSMWPLT

SEQ ID NO: 207 - protein, 11 aa, synthetic construct
SSWDDDLNGPV

SEQ ID NO: 208 - protein, 8 aa, synthetic construct
QSYDSSVV

SEQ ID NO: 209 - protein, 11 aa, synthetic construct
AAWDVSLNGQV

SEQ ID NO: 210 - protein, 11 aa, synthetic construct
SAWDSSLSDWV

SEQ ID NO: 211 - protein, 9 aa, synthetic construct
QQRFNWPPT

SEQ ID NO: 212 - protein, 10 aa, synthetic construct
QSADASENSV

SEQ ID NO: 213 - protein, 9 aa, synthetic construct
QSYDTSNLV

SEQ ID NO: 214 - protein, 10 aa, synthetic construct
ETWDSNTHVV

SEQ ID NO: 215 - protein, 9 aa, synthetic construct
QQVNSFPRT

SEQ ID NO: 216 - protein, 11 aa, synthetic construct
SAWDESLSSVL

SEQ ID NO: 217 - protein, 8 aa, synthetic construct
GGTFSSYA

SEQ ID NO: 218 - protein, 8 aa, synthetic construct
GVTFSSYA

SEQ ID NO: 219 - protein, 8 aa, synthetic construct
GGTFSSYA

SEQ ID NO: 220 - protein, 8 aa, synthetic construct
GGIFSSYA

SEQ ID NO: 221 - protein, 8 aa, synthetic construct
GVIFSSYA

SEQ ID NO: 222 - protein, 8 aa, synthetic construct
GGTFSSYA

SEQ ID NO: 223 - protein, 8 aa, synthetic construct
GGTFSSYA

SEQ ID NO: 224 - protein, 8 aa, synthetic construct
GGPFRSYA

SEQ ID NO: 225 - protein, 8 aa, synthetic construct
GVPFSSYA

SEQ ID NO: 226 - protein, 8 aa, synthetic construct
GVTFSSYA

SEQ ID NO: 227 - protein, 8 aa, synthetic construct
GVIFSSYA

SEQ ID NO: 228 - protein, 8 aa, synthetic construct
GVTFSSYA

SEQ ID NO: 229 - protein, 8 aa, synthetic construct
GGTFSSYA

SEQ ID NO: 230 - protein, 8 aa, synthetic construct
GGTFSSYA

SEQ ID NO: 231 - protein, 8 aa, synthetic construct
GGPFSSYA

SEQ ID NO: 232 - protein, 8 aa, synthetic construct
GGIFSSYA

SEQ ID NO: 233 - protein, 8 aa, synthetic construct
GGIFRSYA

SEQ ID NO: 234 - protein, 8 aa, synthetic construct
GGTFSSYA

SEQ ID NO: 235 - protein, 8 aa, synthetic construct
GVTFSSYA

SEQ ID NO: 236 - protein, 8 aa, synthetic construct
GGTFSSYA

SEQ ID NO: 237 - protein, 8 aa, synthetic construct
GGTFRSYA

SEQ ID NO: 238 - protein, 8 aa, synthetic construct
GGTFSSYA

SEQ ID NO: 239 - protein, 8 aa, synthetic construct
GGPFSSYA

SEQ ID NO: 240 - protein, 8 aa, synthetic construct
GVTFSSYA

SEQ ID NO: 241 - protein, 8 aa, synthetic construct
GGTFSSYA

SEQ ID NO: 242 - protein, 8 aa, synthetic construct
GVTFRSYA

SEQ ID NO: 243 - protein, 8 aa, synthetic construct
GGTFSSYA

SEQ ID NO: 244 - protein, 8 aa, synthetic construct
GVTFSSYA

SEQ ID NO: 245 - protein, 8 aa, synthetic construct
GGPFSSYA

SEQ ID NO: 246 - protein, 8 aa, synthetic construct
GGIFSSYA

SEQ ID NO: 247 - protein, 8 aa, synthetic construct
IITIFGTA

SEQ ID NO: 248 - protein, 8 aa, synthetic construct
ISPIFGTA

SEQ ID NO: 249 - protein, 8 aa, synthetic construct
ISAIFGTA

SEQ ID NO: 250 - protein, 8 aa, synthetic construct
ITPIFGTA

SEQ ID NO: 251 - protein, 8 aa, synthetic construct
ISPIFGTA

SEQ ID NO: 252 - protein, 8 aa, synthetic construct
ISPIFGTA

SEQ ID NO: 253 - protein, 8 aa, synthetic construct
IITIFGTA

SEQ ID NO: 254 - protein, 8 aa, synthetic construct
IIPIFGTA

SEQ ID NO: 255 - protein, 8 aa, synthetic construct
ISPLFGTA

SEQ ID NO: 256 - protein, 8 aa, synthetic construct
ISPMFGTA

SEQ ID NO: 257 - protein, 8 aa, synthetic construct
IIPIFGTA

SEQ ID NO: 258 - protein, 8 aa, synthetic construct
ISPVFGTA

SEQ ID NO: 259 - protein, 8 aa, synthetic construct
IVPLFGTA

SEQ ID NO: 260 - protein, 8 aa, synthetic construct
IIPIFGTA

SEQ ID NO: 261 - protein, 8 aa, synthetic construct
ISPIFGTA

SEQ ID NO: 262 - protein, 8 aa, synthetic construct
ISAIFGTA

SEQ ID NO: 263 - protein, 8 aa, synthetic construct
IIPMFGTA

SEQ ID NO: 264 - protein, 8 aa, synthetic construct
INPIFGTA

SEQ ID NO: 265 - protein, 8 aa, synthetic construct
ISPMFGTA

SEQ ID NO: 266 - protein, 8 aa, synthetic construct
ITPLFGTA

SEQ ID NO: 267 - protein, 8 aa, synthetic construct
IMPIFGTA

SEQ ID NO: 268 - protein, 8 aa, synthetic construct
ISPMFGTA

SEQ ID NO: 269 - protein, 8 aa, synthetic construct
IIPIFGTA

SEQ ID NO: 270 - protein, 8 aa, synthetic construct
ITPIFGTA

SEQ ID NO: 271 - protein, 8 aa, synthetic construct
ISPMFGTA

SEQ ID NO: 272 - protein, 8 aa, synthetic construct
ISGIFGTA

SEQ ID NO: 273 - protein, 8 aa, synthetic construct
ISPIFGTA

SEQ ID NO: 274 - protein, 8 aa, synthetic construct
ISPMFGTA

SEQ ID NO: 275 - protein, 8 aa, synthetic construct
ISPMFGTA

SEQ ID NO: 276 - protein, 8 aa, synthetic construct
ISPIFGTA

SEQ ID NO: 277 - protein, 10 aa, synthetic construct
ARGATGFYDV

SEQ ID NO: 278 - protein, 16 aa, synthetic construct
ARGREYYASNGDSFDV

SEQ ID NO: 279 - protein, 20 aa, synthetic construct
ARDLSRDSLNLPGSSPGYDL

SEQ ID NO: 280 - protein, 16 aa, synthetic construct
ARGSGYYVAASGAFDV

SEQ ID NO: 281 - protein, 16 aa, synthetic construct
ARSRGYAPGTSFHYDV

SEQ ID NO: 282 - protein, 14 aa, synthetic construct
ARDQGGTRGNYFDV

SEQ ID NO: 283 - protein, 10 aa, synthetic construct
ARGGGGRFDV

SEQ ID NO: 284 - protein, 10 aa, synthetic construct
ARGGVYSFDV

SEQ ID NO: 285 - protein, 18 aa, synthetic construct
ARGLGTYSPSLYPRGMDV

SEQ ID NO: 286 - protein, 15 aa, synthetic construct
ARGRAYLSVRGSFDV

SEQ ID NO: 287 - protein, 10 aa, synthetic construct
ARGGSGSFDV

SEQ ID NO: 288 - protein, 18 aa, synthetic construct
ARSRGYTVSSLAGRYFDQ

SEQ ID NO: 289 - protein, 10 aa, synthetic construct
ARGLGLYFDV

SEQ ID NO: 290 - protein, 15 aa, synthetic construct
ARVRGGYGPYGDFDV

SEQ ID NO: 291 - protein, 16 aa, synthetic construct
ARGRSYIVSVSPGFDV

SEQ ID NO: 292 - protein, 16 aa, synthetic construct
ARDSGIASGYTAYMDY

SEQ ID NO: 293 - protein, 10 aa, synthetic construct
ARGAGSTFDV

SEQ ID NO: 294 - protein, 14 aa, synthetic construct
ARGESAYYSRNYDV

SEQ ID NO: 295 - protein, 16 aa, synthetic construct
ARGGGYYPAGVGRYDV

SEQ ID NO: 296 - protein, 14 aa, synthetic construct
ARGPTLYSPPVFDV

SEQ ID NO: 297 - protein, 16 aa, synthetic construct
ARGAGVSAGPSWPFDV

SEQ ID NO: 298 - protein, 16 aa, synthetic construct
ARSRGYNVAASFGFDV

SEQ ID NO: 299 - protein, 14 aa, synthetic construct
ARGTDYSGYRGFDV

SEQ ID NO: 300 - protein, 9 aa, synthetic construct
ARGGGVFDV

SEQ ID NO: 301 - protein, 15 aa, synthetic construct
AREGGYSPGGVDFDY

SEQ ID NO: 302 - protein, 14 aa, synthetic construct
ARSPAYYFGPNMDV

SEQ ID NO: 303 - protein, 18 aa, synthetic construct
ARGPGYHPAGASGQFFDL

SEQ ID NO: 304 - protein, 16 aa, synthetic construct
ARGRGYAPDALTNFDV

SEQ ID NO: 305 - protein, 18 aa, synthetic construct
ARGYSYYPGGGGGRNFDY

SEQ ID NO: 306 - protein, 15 aa, synthetic construct
ARSGGYYDYGVGYDQ

SEQ ID NO: 307 - protein, 8 aa, synthetic construct
SSNIGSNT

SEQ ID NO: 308 - protein, 6 aa, synthetic construct
NIATKS

SEQ ID NO: 309 - protein, 6 aa, synthetic construct
NIATKS

SEQ ID NO: 310 - protein, 8 aa, synthetic construct
INNVGDQG

SEQ ID NO: 311 - protein, 6 aa, synthetic construct
NIGSKS

SEQ ID NO: 312 - protein, 8 aa, synthetic construct
SNNVGNQG

SEQ ID NO: 313 - protein, 8 aa, synthetic construct
TSNIGNNA

SEQ ID NO: 314 - protein, 8 aa, synthetic construct
GSNVGSNV

SEQ ID NO: 315 - protein, 8 aa, synthetic construct
SSNIGRND

SEQ ID NO: 316 - protein, 8 aa, synthetic construct
SSNIGSNT

SEQ ID NO: 317 - protein, 8 aa, synthetic construct
SSNLGSNY

SEQ ID NO: 318 - protein, 7 aa, synthetic construct
ESLCSTC

SEQ ID NO: 319 - protein, 9 aa, synthetic construct
TGAVTSGYY

SEQ ID NO: 320 - protein, 8 aa, synthetic construct
SSNIGSHS

SEQ ID NO: 321 - protein, 9 aa, synthetic construct
SSDVGGYNY

SEQ ID NO: 322 - protein, 6 aa, synthetic construct
SLRTSY

SEQ ID NO: 323 - protein, 8 aa, synthetic construct
SSNIGSNT

SEQ ID NO: 324 - protein, 8 aa, synthetic construct
SSNVGNQG

SEQ ID NO: 325 - protein, 12 aa, synthetic construct
QNVLYSSNNKNN

SEQ ID NO: 326 - protein, 9 aa, synthetic construct
SGSVSTTNY

SEQ ID NO: 327 - protein, 8 aa, synthetic construct
SNNVGKQG

SEQ ID NO: 328 - protein, 6 aa, synthetic construct
QYIDRS

SEQ ID NO: 329 - protein, 9 aa, synthetic construct
SGSVSSFNY

SEQ ID NO: 330 - protein, 8 aa, synthetic construct
SSNIGNNA

SEQ ID NO: 331 - protein, 8 aa, synthetic construct
SGSIASTY

SEQ ID NO: 332 - protein, 9 aa, synthetic construct
SSNIGAGYD

SEQ ID NO: 333 - protein, 8 aa, synthetic construct
SNNVGNQG

SEQ ID NO: 334 - protein, 12 aa, synthetic construct
RSLFDSSDNKNY

SEQ ID NO: 335 - protein, 8 aa, synthetic construct
SSNIGSNT

SEQ ID NO: 336 - protein, 8 aa, synthetic construct
RSNIGSNT

SEQ ID NO: 337-366 - skipped (30 entries)

SEQ ID NO: 367 - protein, 11 aa, synthetic construct
AAWDDSLNGPV

SEQ ID NO: 368 - protein, 12 aa, synthetic construct
AAWDDSLSGPWV

SEQ ID NO: 369 - protein, 11 aa, synthetic construct
SAWDSSLSDWV

SEQ ID NO: 370 - protein, 9 aa, synthetic construct
QQYSSSPYT

SEQ ID NO: 371 - protein, 11 aa, synthetic construct
QLWDHTNSHVV

SEQ ID NO: 372 - protein, 11 aa, synthetic construct
SAWDNTVSGWV

SEQ ID NO: 373 - protein, 11 aa, synthetic construct
EAWDDSLSGPV

SEQ ID NO: 374 - protein, 11 aa, synthetic construct
AAWDDRLNGFV

SEQ ID NO: 375 - protein, 11 aa, synthetic construct
AAWDASLMIYV

SEQ ID NO: 376 - protein, 11 aa, synthetic construct
AAWDDSLNGYV

SEQ ID NO: 377 - protein, 11 aa, synthetic construct
AAWDDSLNGVV

SEQ ID NO: 378 - protein, 9 aa, synthetic construct
QQYGSSPQT

SEQ ID NO: 379 - protein, 9 aa, synthetic construct
LLYYGGPWV

SEQ ID NO: 380 - protein, 11 aa, synthetic construct
AAWDDGLSGWV

SEQ ID NO: 381 - protein, 11 aa, synthetic construct
ASWDDSLNAYV

SEQ ID NO: 382 - protein, 11 aa, synthetic construct
NSRGSGGNPYV

SEQ ID NO: 383 - protein, 11 aa, synthetic construct
AAWDDSLNGRV

SEQ ID NO: 384 - protein, 11 aa, synthetic construct
SAWDNSLSAWV

SEQ ID NO: 385 - protein, 9 aa, synthetic construct
QQYYGKPFT

SEQ ID NO: 386 - protein, 10 aa, synthetic construct
VLYMGRGIYV

SEQ ID NO: 387 - protein, 11 aa, synthetic construct
SAWDSSLSVWV

SEQ ID NO: 388 - protein, 9 aa, synthetic construct
HQTSSLPWT

SEQ ID NO: 389 - protein, 10 aa, synthetic construct
ALYVGGGISV

SEQ ID NO: 390 - protein, 11 aa, synthetic construct
AAWDDSLSGPV

SEQ ID NO: 391 - protein, 9 aa, synthetic construct
QSFDASTLV

SEQ ID NO: 392 - protein, 11 aa, synthetic construct
QSYDSSLSVVV

SEQ ID NO: 393 - protein, 11 aa, synthetic construct
SAWDSSLSAWV

SEQ ID NO: 394 - protein, 11 aa, synthetic construct
QQYFSSPPIFT

SEQ ID NO: 395 - protein, 11 aa, synthetic construct
AAWDDSLKGRV

SEQ ID NO: 396 - protein, 8 aa, synthetic construct
QSYDSSVV

SEQ ID NO: 397 - DNA, 372 bp, synthetic construct
  source 1..372: mol_type = other DNA
caggttcaattagtgcagtctggtgctgaagtgaaaaagcccggctcaagtgttaaagtaagctgtaaggcgagcggtggcccattcagctcatacgccattagctgggtgcgacaggctcctggtcagggcctcgaatggatgggcggcattagcccaatgtttggcactgcaaattatgcccagaaatttcagggtagagtcacaattaccgcagacaagagcacctcaaccgcctacatggaactgagtagcctgcgttccgaagatacagctgtgtattactgtgcgcgcgacgacggttacgctcctagtggtggtctgcgtgagtttgacgtttggggccaggggaccttagtcactgtgtctagc

SEQ ID NO: 398 - DNA, 340 bp, synthetic construct
  source 1..340: mol_type = other DNA
gacatccagatgacccagtctccagactccctggctgtgtctctgggcgagagggccaccatcaactgcaagtccagccggagtgttttatacagctccaacaacaagaactacttagcttggtaccaacaaaaaccgggacagcctcctaagttgctcatttattgggcttctacccgggaatccggggtccctgaccgattcagtggcagcgggtctgggacagatttcactctcaccatcagcagcctgcaggctgaagatgtggcggtttattactgtcagcaatattatagtggttcctggacattcggccaagggaccaaggtggaaatcaaac

SEQ ID NO: 399 - DNA, 363 bp, synthetic construct
  source 1..363: mol_type = other DNA
caggttcaattagtgcagtctggtgctgaagtgaaaaagcccggctcaagtgttaaagtaagctgtaaggcgagcggaggcatctttagctcatacgccattagctgggtgcgacaggctcctggtcagggcctcgaatggatgggcggcattagccctatctttggcactgcaaattatgcccagaaatttcagggtagagtcacaattaccgcagataaaagcacgaataccgcctacatggaactgagtagcctgcgttccgaagatacagctgtgtattactgtgcgcgcggtcgtggtgcttacatgggtcctagtatggatgtgtggggccaggggaccttagtcactgtgtctagc

SEQ ID NO: 400 - DNA, 325 bp, synthetic construct
  source 1..325: mol_type = other DNA
cagcctgtgctgactcagccaccctcggtgtcagtggccccaggacagacggccaggattacctgtgggggaaacaacattggaagtaaaagtgtgcactggtaccagcagaagccaggccaggcccctgtgctggtcgtctatgatgatagcgaccggccctcagggatccctgagcgattctctggctccaactctgggaacacggccaccctgaccatcagcagggtcgaggccggggatgaggccgactactactgtcaggtgtgggataggagtagtgatcatgtggtgttcggcggagggaccaagctgaccgtcctag

SEQ ID NO: 401 - DNA, 363 bp, synthetic construct
  source 1..363: mol_type = other DNA
caggttcaattagtgcagtctggtgctgaagtgaaaaagcccggctcaagtgttaaagtaagctgtaaggcgagcggaggtaccttcagctcatacgccattagctgggtgcgacaggctcctggtcagggcctcgaatggatgggcggcatcagcccaatctttggcactgcaaattatgcccagaaatttcagggtagagtcacaattaccgcagataaaagcacgtcaactgtgtatatggaactgagtagcctgcgttccgaagatacagctgtgtattactgtgcgcgcggtgctcgttactacgctggtggttacttcgatgtgtggggccaggggaccttagtcactgtgtctagc

SEQ ID NO: 402 - DNA, 325 bp, synthetic construct
  source 1..325: mol_type = other DNA
gaaattgtgctgactcagtctccaggcaccctgtctttgtctccaggggaaagagccaccctctcctgcagggccagtcagactgttagcaactacttagcctggtatcagcagagacctggccaggctcccaggctcctcatctacgctgcatccacgcgggccactggtgtcccagccaggttcagtggcagcgggtctgggacagagttcactctcaccatcagcagcctgcaatctgaagattttgcaatttattactgtcaacagtatgataacttgcctccggtcactttcggccctgggaccacagtggatatcaaac

SEQ ID NO: 403 - DNA, 375 bp, synthetic construct
  source 1..375: mol_type = other DNA
caggttcaattagtgcagtctggtgctgaagtgaaaaagcccggctcaagtgttaaagtaagctgtaaggcgagcggtgttacctttagctcatacgccattagctgggtgcgacaggctcctggtcagggcctcgaatggatgggcggcatcagcccaatcttcggtactgcaaattatgcccagaaatttcagggtagagtcacaattaccgcagatcagagtaccaacactgtctacatggaactgagtagcctgcgttccgaagatacagctgtgtattactgtgcgcgcgacagtggtaattacgacggttacggtcctggtagtcgtttcgacgtgtggggccaggggaccttagtcactgtgtctagc

SEQ ID NO: 404 - DNA, 331 bp, synthetic construct
  source 1..331: mol_type = other DNA
cagcctgggctgactcagccaccctcagcgtctgggacccccgggcagagggtcaccatctcttgttctggaagcagctccaacatcggaagtaatactgtaaactggtaccagcagctcccaggaacggcccccaaactcctcatctatagtaataatcagcggccctcaggggtccctgaccgattctctggctccaagtctggcacctcagcctccctggccatcagtgggctccagtctgaggatgaggctgattatttctgttcagcttgggatgacagcctgggtggcgaggtcttcggaactgggaccaaggtcaacgtcctag

SEQ ID NO: 405 - DNA, 363 bp, synthetic construct
  source 1..363: mol_type = other DNA
caggttcaattagtgcagtctggtgctgaagtgaaaaagcccggctcaagtgttaaagtaagctgtaaggcgagcggagtgacctttagttcttacgccattagctgggtgcgacaggctcctggtcagggcctcgaatggatgggcggcattatgcctatgttcggcactgcaaattatgcccagaaatttcagggtagagtcacaattaccgcagataagagtacgagcactgcctatatggaactgagtagcctgcgttccgaagatacagctgtgtattactgtgcgcgcgagcgtggtagttggagtttcggttactttgatgtgtggggccaggggaccttagtcactgtgtctagc

SEQ ID NO: 406 - DNA, 325 bp, synthetic construct
  source 1..325: mol_type = other DNA
ctgcctgtgctgactcagccaccctcgatgtcagcggccccaggacagacggccaggattacctgtgggggagaccacattggaagtaaaagtgtgcactggtaccagcggaagccgggccaggcccctgtgctggtcatctattctgacaccgaccggccctcagggatccctgagcggttctctggctccaactctgggaacacggccaccctgaccatcagcagggtcgaagccggggatgaggccgactatttctgtcaggtgtgggatagtagtaatgatcatccggtgttcggcggaggcaccaagctgaccgtcctag

SEQ ID NO: 407 - DNA, 363 bp, synthetic construct
  source 1..363: mol_type = other DNA
caggttcaattagtgcagtctggtgctgaagtgaaaaagcccggctcaagtgttaaagtaagctgtaaggcgagcggagtgacctttagctcttacgccattagctgggtgcgacaggctcctggtcagggcctcgaatggatgggcggcatcagccctctgtttggcactgcaaattatgcccagaaatttcagggtagagtcacaattaccgcagacaaaagtacgagcaccgtgtatatggaactgagtagcctgcgttccgaagatacagctgtgtattactgtgcgcgcagtcgtacatacgctgacggtcgtacattcgacgtgtggggccaggggaccttagtcactgtgtctagc

SEQ ID NO: 408 - DNA, 331 bp, synthetic construct
  source 1..331: mol_type = other DNA
cagtctgtgctgactcagccaccctccgcgtccgggtctcctggacagtcggtcaccatctcctgcactggaaccagtagtgacgttggtggttataaccatgtctcctggtaccaacagcacccaggcaaagcccccaaagtcctgatttatgacgtcagtaagcggccctcaggggtcccagatcgcttctctggctccaagtctggcaacacggcctccctgaccgtctctgggctccaggctgaggatgaggctgattattactgcacctcatatgcaggcagcaacagtttggtcttcggaactgggaccgaggtcaccgtcctag

SEQ ID NO: 409 - DNA, 372 bp, synthetic construct
  source 1..372: mol_type = other DNA
caggttcaattagtgcagtctggtgctgaagtgaaaaagcccggctcaagtgttaaagtaagctgtaaggcgagcggtggcactttcagttcatacgccattagctgggtgcgacaggctcctggtcagggcctcgaatggatgggcggcatcagcccaatctttggtactgcaaattatgcccagaaatttcagggtagagtcacaattaccgcagacaagagcacgagcactgcctacatggaactgagtagcctgcgttccgaagatacagctgtgtattactgtgcgcgcgagctgggttacctggctggtagtcctagtcctggtttcgattactggggccaggggaccttagtcactgtgtctagc

SEQ ID NO: 410 - DNA, 328 bp, synthetic construct
  source 1..328: mol_type = other DNA
cagtctgtgctgactcagccaccctccgcgtccgggtctcctggacagtcagtcaccatctcctgcactggaaccagcagtgacgttggtggttataactatgtctcctggtaccaacagcacccaggcaaagcccccaaactcatcatttatgaggtcactaagcggccctcaggggtccctgatcgcttctctggctccaagtctggcaacacggcctccctgaccgtcgctgggctccaggctgaggatgaggctgattattactgcagctcgtatgcaggcggcaagtgggtcttcggaactgggaccaaggtcaccgtcctag

SEQ ID NO: 411 - DNA, 363 bp, synthetic construct
  source 1..363: mol_type = other DNA
caggttcaattagtgcagtctggtgctgaagtgaaaaagcccggctcaagtgttaaagtaagctgtaaggcgagcggaggcacttttagctcttacgccattagctgggtgcgacaggctcctggtcagggcctcgaatggatgggcggcattagcccaatcttcggcactgcaaattatgcccagaaatttcagggtagagtcacaattaccgcagacaccagcacctcaaccgcctacatggaactgagtagcctgcgttccgaagatacagctgtgtattactgtgcgcgcagtcgtcgttactgggctgacggtggtttcgattattggggccaggggaccttagtcactgtgtctagc

SEQ ID NO: 412 - DNA, 331 bp, synthetic construct
  source 1..331: mol_type = other DNA
ctgcctgtgctgactcagccaccctcagcgtctgggacccccgggcagagggtcaccatctcttgttctggaagcagctccaacatgggaagaaataccgtcaactggtaccggcacctcccagggacggcccccgaactcctcatctatgataatgatgagcgtccctcaggggtccctgaccgattctctggctccaagtctggcacctcagcctccctggccatcagtgggctccagtctgaagatgagggtcattattactgtgctgcgtgggatgacagcctgaatggtccggtgttcggcggagggaccaagctgaccgtcctgg

SEQ ID NO: 413 - DNA, 366 bp, synthetic construct
  source 1..366: mol_type = other DNA
caggttcaattagtgcagtctggtgctgaagtgaaaaagcccggctcaagtgttaaagtaagctgtaaggcgagcggaggtacttttagttcttacgccattagctgggtgcgacaggctcctggtcagggcctcgaatggatgggcggcattagccctatgttcggtactgcaaattatgcccagaaatttcagggtagagtcacaattaccgcagacaaaagtaccagcactgcctacatggaactgagtagcctgcgttccgaagatacagctgtgtattactgtgcgcgcgagggtggttacagtcctggtggtgttgacttcgactactggggccaggggaccttagtcactgtgtctagc

SEQ ID NO: 414 - DNA, 331 bp, synthetic construct
  source 1..331: mol_type = other DNA
aattttatgctgactcagccccactctgtgtcggagtctccggggaagacggtaaccatctcctgcacccgcagcagtggcagcattgccagcacctatgtgcagtggtaccggcagcgcccgggcagtgcccccaccactgtgatctatgaggatcatcagagaccctctggggtccctgatcggttctccggctccctcgacagctcctccaactctgcctccctcaccatctctggactgaggactgaggacgcggcaacctactactgtcagtcttttgatgccagcactctggtgttcggcggcgggaccaagctgaccgtcctcg

SEQ ID NO: 415 - DNA, 363 bp, synthetic construct
  source 1..363: mol_type = other DNA
caggttcaattagtgcagtctggtgctgaagtgaaaaagcccggctcaagtgttaaagtaagctgtaaggcgagcggtgttacttttagttcttacgccattagctgggtgcgacaggctcctggtcagggcctcgaatggatgggcggcatcagcccaatctttggtactgcaaattatgcccagaaatttcagggtagagtcacaattaccgcagacgaaagtacgaatactgtgtatatggaactgagtagcctgcgttccgaagatacagctgtgtattactgtgcgcgcggtacaacatacagtacagctcgttacttcgacgtttggggccaggggaccttagtcactgtgtctagc

SEQ ID NO: 416 - DNA, 337 bp, synthetic construct
  source 1..337: mol_type = other DNA
aattttatgctgactcagccccactctgtgtcggagtctccggggaagacggtaaccatctcctgcacccgcagaagtggcagcattgccagcaactatgtgcagtggtaccagcagcgcccgggcagtgcccccaccactgtgatctatgaggataaccaaagaccctctggggtccctgatcgcttctctggctccatcgacaggtcctccaactctgcctccctcaccatctctggactgaagactgaggacgaggctgactactactgtcagtcttatgacagcgacaatcatgaagtgatattcggcggagggaccaagctgaccgtcctag

SEQ ID NO: 417 - DNA, 363 bp, synthetic construct
  source 1..363: mol_type = other DNA
caggttcaattagtgcagtctggtgctgaagtgaaaaagcccggctcaagtgttaaagtaagctgtaaggcgagcggagtgacttttcgttcatacgccattagctgggtgcgacaggctcctggtcagggcctcgaatggatgggcggcatcagcggtatctttggtactgcaaattatgcccagaaatttcagggtagagtcacaattaccgcagatgagagcacgtcaaccgcatatatggaactgagtagcctgcgttccgaagatacagctgtgtattactgtgcgcgcagtcctgcttactacttcggtcctaatatggacgtgtggggccaggggaccttagtcactgtgtctagc

SEQ ID NO: 418 - DNA, 334 bp, synthetic construct
  source 1..334: mol_type = other DNA
cagtctgtgctgactcagccaccctcagtgtctggggccccagggcagagggtcaccatctcctgcactgggagcagctccaacatcggggcaggttatgatgtacactggtaccagcaacttccaggaacagtccccaaactcatcatctatgataatagcaatcggccctcaggggtccctgcccgattctctggctccaagtctggcacctcagcctccctggccatcagtgggctccagtctgaggatgaggccgcatattattgccagtcgtatgacagcagcctgagtgttgtggtattcggcggtgggaccaagctgtccgtcctag

SEQ ID NO: 419 - DNA, 369 bp, synthetic construct
  source 1..369: mol_type = other DNA
caggttcaattagtgcagtctggtgctgaagtgaaaaagcccggctcaagtgttaaagtaagctgtaaggcgagcggaggcacttttagttcttacgccattagctgggtgcgacaggctcctggtcagggcctcgaatggatgggcggcatcagccctatgtttggtactgcaaattatgcccagaaatttcagggtagagtcacaattaccgcagacaaaagtacgagcactgcctacatggaactgagtagcctgcgttccgaagatacagctgtgtattactgtgcgcgcagtagtcgttacgctcctagtgacagtacaaattttgatcaatggggccaggggaccttagtcactgtgtctagc

SEQ ID NO: 420 - DNA, 334 bp, synthetic construct
  source 1..334: mol_type = other DNA
aattttatgctgactcagccccactctgtgtcggagtctccggggaagacggtaaccatctcctgcaccggcagcagtggcagcattgccagcaactatgtgcagtggtaccagcagcgcccgggcagtgcccccaccactgtgatctatgaggataaccaaagaccctctggggtccctgatcggttctctggctccatcgacagctcctccaactctgcctccctcaccatctctggactgaagactgaggacgaggctgactactactgtcagtcttatgataccagcaatcggaaggttttcggcggagggaccaagctgaccgtcctag

SEQ ID NO: 421 - DNA, 363 bp, synthetic construct
  source 1..363: mol_type = other DNA
caggttcaattagtgcagtctggtgctgaagtgaaaaagcccggctcaagtgttaaagtaagctgtaaggcgagcggtggcccatttagttcatacgccattagctgggtgcgacaggctcctggtcagggcctcgaatggatgggcggcattagcggtatctttggcactgcaaattatgcccagaaatttcagggtagagtcacaattaccgcagatgagagcacgtcaaccgcatatatggaactgagtagcctgcgttccgaagatacagctgtgtattactgtgcgcgcggtgaccgtttctacgttggtgagcgtttcgatgtgtggggccaggggaccttagtcactgtgtctagc

SEQ ID NO: 422 - DNA, 328 bp, synthetic construct
  source 1..328: mol_type = other DNA
cagtctgtgctgactcagccaccctcggtgtcagtggccccaggacagacggccagaattacctgtgggggaaatgacattggaagtaaaagtgtccactggtaccagcagaagccaggccaggcccctgtgctggtcgtctatgatgatatcgaccggccctcagggatccctgagcgattctctggctccaactatggggacacggccaccctgaccatcagctgggtcgaggccggggatgaggccgactattactgtcaggtgtgggatactaatagtgatcccgtctttgtcttcggaagtgggaccaaggtcaccgtccttg

SEQ ID NO: 423 - DNA, 375 bp, synthetic construct
  source 1..375: mol_type = other DNA
caggttcaattagtgcagtctggtgctgaagtgaaaaagcccggctcaagtgttaaagtaagctgtaaggcgagcggtggcaccttcagctcttacgccattagctgggtgcgacaggctcctggtcagggcctcgaatggatgggcggcattagcccaatcttcggtactgcaaattatgcccagaaatttcagggtagagtcacaattaccgcagaccagagcacgagcactgcctacatggaactgagtagcctgcgttccgaagatacagctgtgtattactgtgcgcgcggtggtggtgttggtcgtatctggatcgctggttacggtttcgatcagtggggccaggggaccttagtcactgtgtctagc

SEQ ID NO: 424 - DNA, 331 bp, synthetic construct
  source 1..331: mol_type = other DNA
cagactgtggtgactcaggagccatcgttctcagtgtcccctggagggacagttaccctcacttgtggcttgagctctggctcagtctccactagtaactaccccagctggtaccagcagaccccaggccagcctccacgcacgctcatctacagcacaaacactcgctcttctggggtccctgatcgcttctctggctccatccttgggaacaaagctgccctcaccatcacgggggcccaggcagatgatgaatctgattattactgtgtcctatatatgggtagtggcatttcgatgttcggcggagggaccaagttgaccgtcctag

SEQ ID NO: 425 - DNA, 375 bp, synthetic construct
  source 1..375: mol_type = other DNA
caggttcaattagtgcagtctggtgctgaagtgaaaaagcccggctcaagtgttaaagtaagctgtaaggcgagcggtggtacttttagttcatacgccattagctgggtgcgacaggctcctggtcagggcctcgaatggatgggcggcattagcccaatctttggtactgcaaattatgcccagaaatttcagggtagagtcacaattaccgcagacgaaagcaccagcactgtgtacatggaactgagtagcctgcgttccgaagatacagctgtgtattactgtgcgcgcggtcctggttaccaccctgctggtgctagtggtcaattctttgatctttggggccaggggaccttagtcactgtgtctagc

SEQ ID NO: 426 - DNA, 331 bp, synthetic construct
  source 1..331: mol_type = other DNA
tcctatgagctgactcagccaccctcggtgtccaaggacttgagacagaccgccacactcacctgcactgggaacagcaacaatgttggcaaccaaggagcagcttggctgcagcagcaccagggccaccctcccaaactcctatcctacaggaataaccaccggccctcagggatctcagacagatcatctgcatccaggtcaggagacacagcctccctgaccattactggactccagcctgaggacgaggctgactattactgctcagcatgggacagcagcctcagtgcttgggtgttcggcggagggaccaagctgaccgtcctag

SEQ ID NO: 427 - DNA, 369 bp, synthetic construct
  source 1..369: mol_type = other DNA
caggttcaattagtgcagtctggtgctgaagtgaaaaagcccggctcaagtgttaaagtaagctgtaaggcgagcggtgtgaccttcagctcatacgccattagctgggtgcgacaggctcctggtcagggcctcgaatggatgggcggcattagccctatgtttggtactgcaaattatgcccagaaatttcagggtagagtcacaattaccgcagatgaaagcaccaacaccgcctatatggaactgagtagcctgcgttccgaagatacagctgtgtattactgtgcgcgcggtcgtggttacgctcctgacgctctgacaaattttgacgtttggggccaggggaccttagtcactgtgtctagc

SEQ ID NO: 428 - DNA, 346 bp, synthetic construct
  source 1..346: mol_type = other DNA
gaaattgtgctgactcagtctccagactccctggctatgtctctgggcgagagggccaccgtcaactgcaagtccagccggagtcttttcgacagctccgacaataagaactacttagcttggtaccagaagaaaccaggacagcctcctcaattgctcatttactgggcatctacccgacaatccggggtccctgaccgattcagtggcagcgggtctgggacagatttcactctcaccatcagcagcctgcaggctgaagatgtggcagtttattactgtcagcaatattttagtagtcctcccatattcaccttcggccctgggaccaaagtggagatcaaac

SEQ ID NO: 429 - DNA, 366 bp, synthetic construct
  source 1..366: mol_type = other DNA
caggttcaattagtgcagtctggtgctgaagtgaaaaagcccggctcaagtgttaaagtaagctgtaaggcgagcggagtgacttttagctcatacgccattagctgggtgcgacaggctcctggtcagggcctcgaatggatgggcggcattacccctatgtttggtactgcaaattatgcccagaaatttcagggtagagtcacaattaccgcagataaaagtacgagcaccgtctatatggaactgagtagcctgcgttccgaagatacagctgtgtattactgtgcgcgcggtcgtggttacatcgctgttgctggtgacatggacgtgtggggccaggggaccttagtcactgtgtctagc

SEQ ID NO: 430 - DNA, 340 bp, synthetic construct
  source 1..340: mol_type = other DNA
gacatccagatgacccagtctccagactccctggctgtgtctctgggcgagagggccaccatcaactgcaagtccagtcggagtgttttatacagctccaacaataagaactacttagcttggtaccagcagaaagcaggacagcctcctaagctgctcatttactgggcatctacccgggaatccggggtccctgaccgattcagtggcagcgggtctgggacagatttcactctcaccatcagcagcctgcaggctgaagatgtggcagtttattactgtcagcaatattatagtactcctccgacgttcggccaagggaccaaggtggaaatcaaac

SEQ ID NO: 431 - DNA, 372 bp, synthetic construct
  source 1..372: mol_type = other DNA
caggttcaattagtgcagtctggtgctgaagtgaaaaagcccggctcaagtgttaaagtaagctgtaaggcgagcggtgttaccttcagttcatacgccattagctgggtgcgacaggctcctggtcagggcctcgaatggatgggcggcattagcccactgttcggtactgcaaattatgcccagaaatttcagggtagagtcacaattaccgcagataagagcacgagcactgcctacatggaactgagtagcctgcgttccgaagatacagctgtgtattactgtgcgcgcggtgacgcttactacgttggtggtggtgctcgtccttttgacctctggggccaggggaccttagtcactgtgtctagc

SEQ ID NO: 432 - DNA, 334 bp, synthetic construct
  source 1..334: mol_type = other DNA
tcctatgagctgactcagccaccctcagtgtctgagacccccgggcagaacgtcattatctcttgttctggaggcagctccaacatcggagttaattatgtatactggtatcaggtggtcccaggagcggcccccaaactcctcatctataggaataatcagcggccctcaggggtccctgaccgattctctggctccaagtctggcacctcagcctccctggccatcagtggactccagtctgaggatgaggctgactattactgtggagtatgggatgacagcctgaatggtcattgggtgttcggcggagggaccgacctgaccgtcctgg

SEQ ID NO: 433 - DNA, 375 bp, synthetic construct
  source 1..375: mol_type = other DNA
caggttcaattagtgcagtctggtgctgaagtgaaaaagcccggctcaagtgttaaagtaagctgtaaggcgagcggtggtccatttagctcatacgccattagctgggtgcgacaggctcctggtcagggcctcgaatggatgggcggcattagccctatgtttggtactgcaaattatgcccagaaatttcagggtagagtcacaattaccgcagatgaaagcacgtcaaccgtgtacatggaactgagtagcctgcgttccgaagatacagctgtgtattactgtgcgcgcggttacagttactaccctggtggtggtggtggtcgtaatttcgactactggggccaggggaccttagtcactgtgtctagc

SEQ ID NO: 434 - DNA, 331 bp, synthetic construct
  source 1..331: mol_type = other DNA
ctgcctgtgctgactcagccaccctcagcgtctgggacccccgggcagagggtcaccatctcttgttctggaagcagctccaacatcggaagtaatactgtaaactggtaccagcagctcccaggaacggcccccaaactcctcatctatagtaataatcagcggccctcaggggtccctgaccgattctctggctccaagtctggcacctcagcctccctggccatcagtgggctccagtctgagggtgaggctgattattactgtgcagcatgggatgacagcctgaaaggtcgggtgttcggcggagggaccaaggtgaccgtcctag

SEQ ID NO: 435 - DNA, 372 bp, synthetic construct
  source 1..372: mol_type = other DNA
caggttcaattagtgcagtctggtgctgaagtgaaaaagcccggctcaagtgttaaagtaagctgtaaggcgagcggaggtccattcagttcttacgccattagctgggtgcgacaggctcctggtcagggcctcgaatggatgggcggcatcagccctctgtttggtactgcaaattatgcccagaaatttcagggtagagtcacaattaccgcagatgaaagcacgtcaaccgcctacatggaactgagtagcctgcgttccgaagatacagctgtgtattactgtgcgcgcgctcctacatactacgctagtcgtgacagttacaatttcgattattggggccaggggaccttagtcactgtgtctagc

SEQ ID NO: 436 - DNA, 325 bp, synthetic construct
  source 1..325: mol_type = other DNA
gaaacgacactcacgcagtctccagccaccctgtctgtgtctccaggggaaagagccaccctctcctgcagggccagtcagagtgttgacagaggctacttagcctggtatcagcagaagcctggccaggctcccaggctcctcatctatggtgcatcccacagggccgctggcatcccagacaggttcagtggcagtgggtctgggacagacttcactctcaccatcagcagactggagcctgaggattttgcagtatatttctgtcagcagtatggtagttcacgcctctctttcggcggagggaccaaggtggagatccaac

SEQ ID NO: 437 - DNA, 363 bp, synthetic construct
  source 1..363: mol_type = other DNA
caggttcaattagtgcagtctggtgctgaagtgaaaaagcccggctcaagtgttaaagtaagctgtaaggcgagcggtgtgactttcagttcttacgccattagctgggtgcgacaggctcctggtcagggcctcgaatggatgggcggcattagccctatgttcggtactgcaaattatgcccagaaatttcagggtagagtcacaattaccgcagacaagagcacgaatactgcatatatggaactgagtagcctgcgttccgaagatacagctgtgtattactgtgcgcgcgacacaacatacatcgctggtggtcacttcgacgtttggggccaggggaccttagtcactgtgtctagc

SEQ ID NO: 438 - DNA, 331 bp, synthetic construct
  source 1..331: mol_type = other DNA
cagtctgtgctgactcagccaccctccgcgtccgggtctcctggacagtcagtcaccatctcctgcactggaaccagcagtgacattggtgcttataactatgtctcctggtaccaacaacacccagacaaagcccccaagctcatcatttatgaggtcagtaagcggccctcaggggtccctgatcgcttctctggctccaagtctggcaacacggcctccctgaccgtctctgggctccaggctgaggatgaggctgattattactgcagctcctatgcaggcagcaacaatgtggtattcggcggagggaccaagctgaccgtcctag

SEQ ID NO: 439 - DNA, 366 bp, synthetic construct
  source 1..366: mol_type = other DNA
caggttcaattagtgcagtctggtgctgaagtgaaaaagcccggctcaagtgttaaagtaagctgtaaggcgagcggtggtaccttcagctcatacgccattagctgggtgcgacaggctcctggtcagggcctcgaatggatgggcggcatcagccctctgtttggcactgcaaattatgcccagaaatttcagggtagagtcacaattaccgcagatgagagtaccaatactgcctatatggaactgagtagcctgcgttccgaagatacagctgtgtattactgtgcgcgcgctagtggttacttcacaggttggggtacattcgactactggggccaggggaccttagtcactgtgtctagc

SEQ ID NO: 440 - DNA, 319 bp, synthetic construct
  source 1..319: mol_type = other DNA
tcctatgagctgactcagccaccctcggtgtcagtgtccccaggacagacggccaggatcacctgctctggagatgcattgccaaagcaatatgcttattggtaccagcagaagccaggccaggcccctgtgctggtgatatataaagacagtgagaggccctcagggatccctgagcgattctctggctccaactctgggaacacagccactctgaccatcagcgggacccaggctttggatgaggctgactattactgtcaggcgtgggacagcagcactgctgtcttcggaactgggaccaaggtcaccgtcctag

SEQ ID NO: 441 - DNA, 363 bp, synthetic construct
  source 1..363: mol_type = other DNA
caggttcaattagtgcagtctggtgctgaagtgaaaaagcccggctcaagtgttaaagtaagctgtaaggcgagcggaggtacttttagttcttacgccattagctgggtgcgacaggctcctggtcagggcctcgaatggatgggcggcatcagccctatctttggtactgcaaattatgcccagaaatttcagggtagagtcacaattaccgcagacaagagcacgagcaccgcctacatggaactgagtagcctgcgttccgaagatacagctgtgtattactgtgcgcgcggtcgttactactacacagttggtgtttatgacgtttggggccaggggaccttagtcactgtgtctagc

SEQ ID NO: 442 - DNA, 331 bp, synthetic construct
  source 1..331: mol_type = other DNA
tcctatgagctgactcagccaccctcggtgtccaagggcttgagacagaccgccaccctcacctgcattggggacagcgacaatgttggcaaccaaggagtaggttggctgcagcagcaccagggccaccctcccaaactcctgtcctacagggataacacccggccctcaggcatctcagagagattctctgcatccaggtcaggaaacacagcctccctgaccattactggactccagcctgaggacgaggctgactattactgctcagcatgggacagcagcctcactgccgtggtgttcggcggagggaccaagctggccgtcctag

SEQ ID NO: 443 - DNA, 381 bp, synthetic construct
  source 1..381: mol_type = other DNA
caggttcaattagtgcagtctggtgctgaagtgaaaaagcccggctcaagtgttaaagtaagctgtaaggcgagcggtgttaccttcagttcttacgccattagctgggtgcgacaggctcctggtcagggcctcgaatggatgggcggcattagccctatctttggcactgcaaattatgcccagaaatttcagggtagagtcacaattaccgcagataaaagtacctcaaccgtctacatggaactgagtagcctgcgttccgaagatacagctgtgtattactgtgcgcgcggtggtggttacagtgctgacggtggtgctggtaataatacaatcttcgacgtttggggccaggggaccttagtcactgtgtctagc

SEQ ID NO: 444 - DNA, 331 bp, synthetic construct
  source 1..331: mol_type = other DNA
cagcctgtgctgactcagccaccctcggtgtccaagggcttgagacagaccgccacactcacctgtactgggaacaacaacaatgttggcaaccaaggagcagcctggctgcagcagcaccagggccaccctcccaaactcctatccgacaggaataacaaccggccctcagggatctcagagagattatctgcatccaggtcaggaaatacagcctccctgaccattactggactccaggctgaggacgaggctgactattactgctcagcatgggacagcagcctcagtgcttgggtgttcggcggagggaccaagctgaccgtcctaa

SEQ ID NO: 445 - DNA, 366 bp, synthetic construct
  source 1..366: mol_type = other DNA
caggttcaattagtgcagtctggtgctgaagtgaaaaagcccggctcaagtgttaaagtaagctgtaaggcgagcggagttacttttagctcttacgccattagctgggtgcgacaggctcctggtcagggcctcgaatggatgggcggcattagccctctgtttggtactgcaaattatgcccagaaatttcagggtagagtcacaattaccgcagatgagagtacctcaactgcatatatggaactgagtagcctgcgttccgaagatacagctgtgtattactgtgcgcgcgagcgtggttacacagttggtggtggtggtatggacgtgtggggccaggggaccttagtcactgtgtctagc

SEQ ID NO: 446 - DNA, 334 bp, synthetic construct
  source 1..334: mol_type = other DNA
cagtctgccctgactcagcctccctccgcgtccgggtctcctggacagtcagtcaccatctcctgcactggaaccagcagtgacgttggtgctcacaactttgtctcctggtaccaacaacacccagacaaagcccccaaactcatcatttatgaggtcaataggcggccctcaggggtccctgatcgcttctctggctccaagtctggcacctcagcctccctggccatcagtggtctccagtctgacgatgaggctgactattactgtgcagcatgggacgacagtctcgatggtccggtgttcggcggagggaccaagctgaccgtcctag

SEQ ID NO: 447 - DNA, 372 bp, synthetic construct
  source 1..372: mol_type = other DNA
caggttcaattagtgcagtctggtgctgaagtgaaaaagcccggctcaagtgttaaagtaagctgtaaggcgagcggagttacttttagctcatacgccattagctgggtgcgacaggctcctggtcagggcctcgaatggatgggcggcatcagcccaatctttggtactgcaaattatgcccagaaatttcagggtagagtcacaattaccgcagacaagagcacgaacactgtgtacatggaactgagtagcctgcgttccgaagatacagctgtgtattactgtgcgcgcgagtacctgggtgacgactacagtagtggtagttacttcgatgtgtggggccaggggaccttagtcactgtgtctagc

SEQ ID NO: 448 - DNA, 322 bp, synthetic construct
  source 1..322: mol_type = other DNA
gaaacgacactcacgcagtctccaggcacactgtctttgtctccaggggaaacagccatcctctcctgtagggccagtcagagtgttgatagtcacttagcctggtaccaacaaaaaggtggccaggctcccaggctcctcatctatggtgcatccaccagggccactggtatcccagccaggttcagtggcagtgggtctgggacagacttcactctcaccatcaatggcctagagcctgaggattttgcaatttatttctgtcagcagcgcagcatgtggcccctcactttcggcggagggaccaaggtggagatcaaac

SEQ ID NO: 449 - DNA, 363 bp, synthetic construct
  source 1..363: mol_type = other DNA
caggttcaattagtgcagtctggtgctgaagtgaaaaagcccggctcaagtgttaaagtaagctgtaaggcgagcggaggtactttcagttcatacgccattagctgggtgcgacaggctcctggtcagggcctcgaatggatgggcggcattagccctatgtttggtactgcaaattatgcccagaaatttcagggtagagtcacaattaccgcagacaaaagtacctcaactgcatatatggaactgagtagcctgcgttccgaagatacagctgtgtattactgtgcgcgcgagagtggttacagtggtacaggtcaatttgacgtgtggggccaggggaccttagtcactgtgtctagc

SEQ ID NO: 450 - DNA, 331 bp, synthetic construct
  source 1..331: mol_type = other DNA
cagtctgtgctgactcagccaccctcagcgtctgggaccgccgggcagagggtcacaatctcctgttttgggagaacctccaacgtcggacgaaacactgttaactggtaccaacaattgcccggagcggcccccaagatcctcatttttaacgataatcaacggccctcgggggtccctgaccgcttctctggctccaagtctggcaccgccgcctccctgaccataagtaggctccagtccgcggatgaggctgattactattgttcatcatgggatgacgacctgaacggtccggtcttcggcggagggaccaagctgagcgtcgtag

SEQ ID NO: 451 - DNA, 366 bp, synthetic construct
  source 1..366: mol_type = other DNA
caggttcaattagtgcagtctggtgctgaagtgaaaaagcccggctcaagtgttaaagtaagctgtaaggcgagcggaggtatctttagttcttacgccattagctgggtgcgacaggctcctggtcagggcctcgaatggatgggcggcattagcccaatcttcggtactgcaaattatgcccagaaatttcagggtagagtcacaattaccgcagatgagagcacgaacaccgcctatatggaactgagtagcctgcgttccgaagatacagctgtgtattactgtgcgcgcagtggtggttactacgactacggtgttggttacgaccaatggggccaggggaccttagtcactgtgtctagc

SEQ ID NO: 452 - DNA, 322 bp, synthetic construct
  source 1..322: mol_type = other DNA
cagcctgtgctgactcagccaccctcagcgtctgggacccccgggcagagggtcaccatctcttgttctggaggcaggtccaacatcggaagtaatactgttaactggtaccagcagctcccaggaacggcccccaaactcctcatctatagtaataatcaccggccctcaggggtccctgatcgcttctctggctccaagtctggcaacacggcctccctgaccatctctgggctccaggcggaggatgaggctgattattactgccagtcctatgacagcagcgttgtattcggcggagggaccaagctgaccgtcctag

SEQ ID NO: 453 - DNA, 366 bp, synthetic construct
  source 1..366: mol_type = other DNA
caggttcaattagtgcagtctggtgctgaagtgaaaaagcccggctcaagtgttaaagtaagctgtaaggcgagcggtggtaccttcagctcttacgccattagctgggtgcgacaggctcctggtcagggcctcgaatggatgggcggcattacccctatctttggcactgcaaattatgcccagaaatttcagggtagagtcacaattaccgcagacgagagtaccagcactgcctacatggaactgagtagcctgcgttccgaagatacagctgtgtattactgtgcgcgcagtggtggttacagtcctagtatcggtggtttcgacgtttggggccaggggaccttagtcactgtgtctagc

SEQ ID NO: 454 - DNA, 331 bp, synthetic construct
  source 1..331: mol_type = other DNA
cagcctgggctgactcagccaccctcagcgtctgggacccccgggcagagggtcaccatctcttgttctggaagcaggtccaatatcggaagaaatactgtaaactggtaccagcaactcccaggaacggcccccaaactcctcatctatagtaacaatcagcggccctcaggggtccctgaccgagtctctggctccaagtctggcacctcagcctccctggccatcagtgggctccagtctgaggatgaggctgattattactgtgcagcatgggatgtgagcctgaatggtcaggtcttcggaactgggaccaaggtcaccgtcctag

SEQ ID NO: 455 - DNA, 369 bp, synthetic construct
  source 1..369: mol_type = other DNA
caggttcaattagtgcagtctggtgctgaagtgaaaaagcccggctcaagtgttaaagtaagctgtaaggcgagcggaggtacctttagttcatacgccattagctgggtgcgacaggctcctggtcagggcctcgaatggatgggcggcatcagcccaatctttggtactgcaaattatgcccagaaatttcagggtagagtcacaattaccgcagatcgcagtacgagcaccgcctacatggaactgagtagcctgcgttccgaagatacagctgtgtattactgtgcgcgcggtcctggttacgaccctagtagtctgcgtggttttgacgtttggggccaggggaccttagtcactgtgtctagc

SEQ ID NO: 456 - DNA, 330 bp, synthetic construct
  source 1..330: mol_type = other DNA
tcctatgagctgactcagccaccctcggtgtccaaggacttgagacagaccgccacactcacctgcactgggaacagcaacaatgttggcaaccaaggagcagcttggctgcagcagcaccagggccaccctcccaaactcctattctacaagaataacaaccggccctcagggatttcagagagattatctgcatccaggtcaggaaacacagcctccctgaccattactggactccagcctgaggacgaggctgactattactgctcagcatgggacagcagcctcagtgattgggtgttcggcggagggaccaagctgaccgtccta

SEQ ID NO: 457 - DNA, 351 bp, synthetic construct
  source 1..351: mol_type = other DNA
caggttcaattagtgcagtctggtgctgaagtgaaaaagcccggctcaagtgttaaagtaagctgtaaggcgagcggtggcacttttagctcttacgccattagctgggtgcgacaggctcctggtcagggcctcgaatggatgggcggcatcattccaatctttggtactgcaaattatgcccagaaatttcagggtagagtcacaattaccgcagatgagagcacgaatactgcctacatggaactgagtagcctgcgttccgaagatacagctgtgtattactgtgcgcgcggtgaggaggcttactacgacctttggggccaggggaccttagtcactgtgtctagc

SEQ ID NO: 458 - DNA, 322 bp, synthetic construct
  source 1..322: mol_type = other DNA
gaaattgtgttgacgcagtctccaggcaccctgtctttgtctccaggggaaagagccaccctctcctgctgggccagtcagagtgttagcagcttcttagcctggtaccaacacaaacctggccaggttcccaggctcctcatctatgatgcatccaatagggccactggcatcccagccaggttctctggcagtgggtctgggacacacttcactctcactatcagcagcctagagcctgaagattttgcagtttattactgtcagcagcgtttcaattggcctccgacgttcggccaagggaccaaggtggaaagcaaac

SEQ ID NO: 459 - DNA, 366 bp, synthetic construct
  source 1..366: mol_type = other DNA
caggttcaattagtgcagtctggtgctgaagtgaaaaagcccggctcaagtgttaaagtaagctgtaaggcgagcggaggtacttttagttcatacgccattagctgggtgcgacaggctcctggtcagggcctcgaatggatgggcggcatcacccctatgttcggcactgcaaattatgcccagaaatttcagggtagagtcacaattaccgcagacaaaagtacgagcaccgcctatatggaactgagtagcctgcgttccgaagatacagctgtgtattactgtgcgcgcggtacaagttacctgcctggtcgtagtggttttgatgtttggggccaggggaccttagtcactgtgtctagc

SEQ ID NO: 460 - DNA, 322 bp, synthetic construct
  source 1..322: mol_type = other DNA
cagcctgggctgactcagccaccctcggtgtcagtgtccccaggacagacggccaggatcacctgctctgcagatgcattgccaaagcaatatgcttattggtaccagcagaggccaggccaggcccctgtgttgctgatatataaagacactgagaggcccccagggatccctgagcgattctctggctccagctcagggacaacagtcacgttgaccatcagtggagtccaggcagaagacgaggctgactactattgtcaatcagcagacgctagtgaaaattctgtcttcggaggtgggaccaaggtcaccgtcctag

SEQ ID NO: 461 - DNA, 366 bp, synthetic construct
  source 1..366: mol_type = other DNA
caggttcaattagtgcagtctggtgctgaagtgaaaaagcccggctcaagtgttaaagtaagctgtaaggcgagcggtgttacttttcgttcatacgccattagctgggtgcgacaggctcctggtcagggcctcgaatggatgggcggcatcagcgcaatgtttggtactgcaaattatgcccagaaatttcagggtagagtcacaattaccgcagacaagagtacgaacaccgcatatatggaactgagtagcctgcgttccgaagatacagctgtgtattactgtgcgcgcggtcgtggttacgaccctagtgttggtggttttgatgtgtggggccaggggaccttagtcactgtgtctagc

SEQ ID NO: 462 - DNA, 331 bp, synthetic construct
  source 1..331: mol_type = other DNA
aattttatgctgactcagccccactctgtgtcggagtctccggggaagacggtcagcatctcctgcaccggcagcagtggcagcattgccagcaactatgtgcagtggtaccagcagcgcccgggcagtgcccccgccactgtgatctatgaggataaccaaagaccctctggggtccctgatcggttctctggctccatcgacagctcctccaactctgcctccctcaccatctctggactgaagactgaggacgaggctgactactactgtcagtcttatgataccagcaatctggtattcggcgtagggaccaagctgaccgtcctag

SEQ ID NO: 463 - DNA, 381 bp, synthetic construct
  source 1..381: mol_type = other DNA
caggttcaattagtgcagtctggtgctgaagtgaaaaagcccggctcaagtgttaaagtaagctgtaaggcgagcggtggtacctttagttcatacgccattagctgggtgcgacaggctcctggtcagggcctcgaatggatgggcggcattattcctatcttcggtactgcaaattatgcccagaaatttcagggtagagtcacaattaccgcagacgatagcacgtcaaccgcatacatggaactgagtagcctgcgttccgaagatacagctgtgtattactgtgcgcgcgacagtacacctagtgttacaagtagtctgtaccgtatccctgcttttgatgtgtggggccaggggaccttagtcactgtgtctagc

SEQ ID NO: 464 - DNA, 337 bp, synthetic construct
  source 1..337: mol_type = other DNA
ctgcctgtgctgactcaatcatcctctgcctctgcttccctgggatcctcggtcaagctcacctgcagtctgaccaatgggcccagtaactacatcatcgcatggcatcagcagcagccagagaagggccctcggtacttgatgaagcttaacagtgatggcagccacagcaagggggacgggatccctgatcgcttctcaggctccagctctggggctgagcgctacctcaccatctccaaccttaagtctgaggatgaggctgattattactgtgagacctgggacagtaacactcatgtggtattcggcggagggaccaagctgaccgtcctag

SEQ ID NO: 465 - DNA, 366 bp, synthetic construct
  source 1..366: mol_type = other DNA
caggttcaattagtgcagtctggtgctgaagtgaaaaagcccggctcaagtgttaaagtaagctgtaaggcgagcggaggtacctttagttcatacgccattagctgggtgcgacaggctcctggtcagggcctcgaatggatgggcggcattaccccaatgtttggtactgcaaattatgcccagaaatttcagggtagagtcacaattaccgcagacaagagcacgtcaactacatacatggaactgagtagcctgcgttccgaagatacagctgtgtattactgtgcgcgcggtcctggttactaccctgacagtaataattatgatctctggggccaggggaccttagtcactgtgtctagc

SEQ ID NO: 466 - DNA, 325 bp, synthetic construct
  source 1..325: mol_type = other DNA
gaaacgacactcacgcagtctccaggcaccctgtctttgtctccaggggaaagagccaccctctcctgcagggccagtcagagtgttagtagcagctacttagcctggtaccagcagaaacctggccaggctcccaggctcctcatctatggtgcatcaagtagggccactggcatcccagacaggttcagtggcagtgggtctgggacagacttcactctcaccatcagcagactggagcctgaagattttgcaacctactattgtcaacaggttaacagcttccctcgaacttttggccaggggaccaagctggagatgaaac

SEQ ID NO: 467 - DNA, 366 bp, synthetic construct
  source 1..366: mol_type = other DNA
caggttcaattagtgcagtctggtgctgaagtgaaaaagcccggctcaagtgttaaagtaagctgtaaggcgagcggtgtgacctttagctcatacgccattagctgggtgcgacaggctcctggtcagggcctcgaatggatgggcggcattagcccaatgtttggcactgcaaattatgcccagaaatttcagggtagagtcacaattaccgcagaccagagcacgaacaccgcctatatggaactgagtagcctgcgttccgaagatacagctgtgtattactgtgcgcgcggtggtacatacagtcctggtggtacatactttgatgtttggggccaggggaccttagtcactgtgtctagc

SEQ ID NO: 468 - DNA, 331 bp, synthetic construct
  source 1..331: mol_type = other DNA
cagcctgtgctgactcagccaccctcagcgtctgcgacccccggacagacggtgaccatctcttgttctggcagcagttccaacatcggcgtgagctttgtctactggtatcaacaatttccaggaacggcccccaagctcctcatttacagggatgatatgaggcagtcaggggtccctgaccgattttctggcttcaagtctggctcctcagcctccctgaccatctctgggctccagtccgaagatgaggccacttattattgttccgcgtgggatgagagcctgagtagtgtgttgttcggcggagggaccaaggtcaccgtcctag

SEQ ID NO: 469 - protein, 124 aa, synthetic construct
QVQLVQSGAEVKKPGSSVKVSCKASGGPFSSYAISWVRQAPGQGLEWMGGISPMFGTANYAQKFQGRVTITADKSTSTAYMELSSLRSEDTAVYYCARDDGYAPSGGLREFDVWGQGTLVTVSS

SEQ ID NO: 470 - protein, 113 aa, synthetic construct
DIQMTQSPDSLAVSLGERATINCKSSRSVLYSSNNKNYLAWYQQKPGQPPKLLIYWASTRESGVPDRFSGSGSGTDFTLTISSLQAEDVAVYYCQQYYSGSWTFGQGTKVEIK

SEQ ID NO: 471 - protein, 121 aa, synthetic construct
QVQLVQSGAEVKKPGSSVKVSCKASGGIFSSYAISWVRQAPGQGLEWMGGISPIFGTANYAQKFQGRVTITADKSTNTAYMELSSLRSEDTAVYYCARGRGAYMGPSMDVWGQGTLVTVSS

SEQ ID NO: 472 - protein, 108 aa, synthetic construct
QPVLTQPPSVSVAPGQTARITCGGNNIGSKSVHWYQQKPGQAPVLVVYDDSDRPSGIPERFSGSNSGNTATLTISRVEAGDEADYYCQVWDRSSDHVVFGGGTKLTVL

SEQ ID NO: 473 - protein, 121 aa, synthetic construct
QVQLVQSGAEVKKPGSSVKVSCKASGGTFSSYAISWVRQAPGQGLEWMGGISPIFGTANYAQKFQGRVTITADKSTSTVYMELSSLRSEDTAVYYCARGARYYAGGYFDVWGQGTLVTVSS

SEQ ID NO: 474 - protein, 108 aa, synthetic construct
EIVLTQSPGTLSLSPGERATLSCRASQTVSNYLAWYQQRPGQAPRLLIYAASTRATGVPARFSGSGSGTEFTLTISSLQSEDFAIYYCQQYDNLPPVTFGPGTTVDIK

SEQ ID NO: 475 - protein, 125 aa, synthetic construct
QVQLVQSGAEVKKPGSSVKVSCKASGVTFSSYAISWVRQAPGQGLEWMGGISPIFGTANYAQKFQGRVTITADQSTNTVYMELSSLRSEDTAVYYCARDSGNYDGYGPGSRFDVWGQGTLVTVSS

SEQ ID NO: 476 - protein, 110 aa, synthetic construct
QPGLTQPPSASGTPGQRVTISCSGSSSNIGSNTVNWYQQLPGTAPKLLIYSNNQRPSGVPDRFSGSKSGTSASLAISGLQSEDEADYFCSAWDDSLGGEVFGTGTKVNVL

SEQ ID NO: 477 - protein, 121 aa, synthetic construct
QVQLVQSGAEVKKPGSSVKVSCKASGVTFSSYAISWVRQAPGQGLEWMGGIMPMFGTANYAQKFQGRVTITADKSTSTAYMELSSLRSEDTAVYYCARERGSWSFGYFDVWGQGTLVTVSS

SEQ ID NO: 478 - protein, 108 aa, synthetic construct
LPVLTQPPSMSAAPGQTARITCGGDHIGSKSVHWYQRKPGQAPVLVIYSDTDRPSGIPERFSGSNSGNTATLTISRVEAGDEADYFCQVWDSSNDHPVFGGGTKLTVL

SEQ ID NO: 479 - protein, 121 aa, synthetic construct
QVQLVQSGAEVKKPGSSVKVSCKASGVTFSSYAISWVRQAPGQGLEWMGGISPLFGTANYAQKFQGRVTITADKSTSTVYMELSSLRSEDTAVYYCARSRTYADGRTFDVWGQGTLVTVSS

SEQ ID NO: 480 - protein, 121 aa, synthetic construct; identical to SEQ ID NO: 479

SEQ ID NO: 481 - protein, 124 aa, synthetic construct
QVQLVQSGAEVKKPGSSVKVSCKASGGTFSSYAISWVRQAPGQGLEWMGGISPIFGTANYAQKFQGRVTITADKSTSTAYMELSSLRSEDTAVYYCARELGYLAGSPSPGFDYWGQGTLVTVSS

SEQ ID NO: 482 - protein, 109 aa, synthetic construct
QSVLTQPPSASGSPGQSVTISCTGTSSDVGGYNYVSWYQQHPGKAPKLIIYEVTKRPSGVPDRFSGSKSGNTASLTVAGLQAEDEADYYCSSYAGGKWVFGTGTKVTVL

SEQ ID NO: 483 - protein, 121 aa, synthetic construct
QVQLVQSGAEVKKPGSSVKVSCKASGGTFSSYAISWVRQAPGQGLEWMGGISPIFGTANYAQKFQGRVTITADTSTSTAYMELSSLRSEDTAVYYCARSRRYWADGGFDYWGQGTLVTVSS

SEQ ID NO: 484 - protein, 110 aa, synthetic construct
LPVLTQPPSASGTPGQRVTISCSGSSSNMGRNTVNWYRHLPGTAPELLIYDNDERPSGVPDRFSGSKSGTSASLAISGLQSEDEGHYYCAAWDDSLNGPVFGGGTKLTVL

SEQ ID NO: 485 - protein, 122 aa, synthetic construct
QVQLVQSGAEVKKPGSSVKVSCKASGGTFSSYAISWVRQAPGQGLEWMGGISPMFGTANYAQKFQGRVTITADKSTSTAYMELSSLRSEDTAVYYCAREGGYSPGGVDFDYWGQGTLVTVSS

SEQ ID NO: 486 - protein, 110 aa, synthetic construct
NFMLTQPHSVSESPGKTVTISCTRSSGSIASTYVQWYRQRPGSAPTTVIYEDHQRPSGVPDRFSGSLDSSSNSASLTISGLRTEDAATYYCQSFDASTLVFGGGTKLTVL

SEQ ID NO: 487 - protein, 121 aa, synthetic construct
QVQLVQSGAEVKKPGSSVKVSCKASGVTFSSYAISWVRQAPGQGLEWMGGISPIFGTANYAQKFQGRVTITADESTNTVYMELSSLRSEDTAVYYCARGTTYSTARYFDVWGQGTLVTVSS

SEQ ID NO: 488 - protein, 112 aa, synthetic construct
NFMLTQPHSVSESPGKTVTISCTRRSGSIASNYVQWYQQRPGSAPTTVIYEDNQRPSGVPDRFSGSIDRSSNSASLTISGLKTEDEADYYCQSYDSDNHEVIFGGGTKLTVL

SEQ ID NO: 489 - protein, 121 aa, synthetic construct
QVQLVQSGAEVKKPGSSVKVSCKASGVTFRSYAISWVRQAPGQGLEWMGGISGIFGTANYAQKFQGRVTITADESTSTAYMELSSLRSEDTAVYYCARSPAYYFGPNMDVWGQGTLVTVSS

SEQ ID NO: 490 - protein, 111 aa, synthetic construct
QSVLTQPPSVSGAPGQRVTISCTGSSSNIGAGYDVHWYQQLPGTVPKLIIYDNSNRPSGVPARFSGSKSGTSASLAISGLQSEDEAAYYCQSYDSSLSVVVFGGGTKLSVL

SEQ ID NO: 491 - protein, 123 aa, synthetic construct
QVQLVQSGAEVKKPGSSVKVSCKASGGTFSSYAISWVRQAPGQGLEWMGGISPMFGTANYAQKFQGRVTITADKSTSTAYMELSSLRSEDTAVYYCARSSRYAPSDSTNFDQWGQGTLVTVSS

SEQ ID NO: 492 - protein, 111 aa, synthetic construct
NFMLTQPHSVSESPGKTVTISCTGSSGSIASNYVQWYQQRPGSAPTTVIYEDNQRPSGVPDRFSGSIDSSSNSASLTISGLKTEDEADYYCQSYDTSNRKVFGGGTKLTVL

SEQ ID NO: 493 - protein, 121 aa, synthetic construct
QVQLVQSGAEVKKPGSSVKVSCKASGGPFSSYAISWVRQAPGQGLEWMGGISGIFGTANYAQKFQGRVTITADESTSTAYMELSSLRSEDTAVYYCARGDRFYVGERFDVWGQGTLVTVSS

SEQ ID NO: 494 - protein, 109 aa, synthetic construct
QSVLTQPPSVSVAPGQTARITCGGNDIGSKSVHWYQQKPGQAPVLVVYDDIDRPSGIPERFSGSNYGDTATLTISWVEAGDEADYYCQVWDTNSDPVFVFGSGTKVTVL

SEQ ID NO: 495 - protein, 125 aa, synthetic construct
QVQLVQSGAEVKKPGSSVKVSCKASGGTFSSYAISWVRQAPGQGLEWMGGISPIFGTANYAQKFQGRVTITADQSTSTAYMELSSLRSEDTAVYYCARGGGVGRIWIAGYGFDQWGQGTLVTVSS

SEQ ID NO: 496 - protein, 110 aa, synthetic construct
QTVVTQEPSFSVSPGGTVTLTCGLSSGSVSTSNYPSWYQQTPGQPPRTLIYSTNTRSSGVPDRFSGSILGNKAALTITGAQADDESDYYCVLYMGSGISMFGGGTKLTVL

SEQ ID NO: 497 - protein, 125 aa, synthetic construct
QVQLVQSGAEVKKPGSSVKVSCKASGGTFSSYAISWVRQAPGQGLEWMGGISPIFGTANYAQKFQGRVTITADESTSTVYMELSSLRSEDTAVYYCARGPGYHPAGASGQFFDLWGQGTLVTVSS

SEQ ID NO: 498 - protein, 110 aa, synthetic construct
SYELTQPPSVSKDLRQTATLTCTGNSNNVGNQGAAWLQQHQGHPPKLLSYRNNHRPSGISDRSSASRSGDTASLTITGLQPEDEADYYCSAWDSSLSAWVFGGGTKLTVL

SEQ ID NO: 499 - protein, 123 aa, synthetic construct
QVQLVQSGAEVKKPGSSVKVSCKASGVTFSSYAISWVRQAPGQGLEWMGGISPMFGTANYAQKFQGRVTITADESTNTAYMELSSLRSEDTAVYYCARGRGYAPDALTNFDVWGQGTLVTVSS

SEQ ID NO: 500 - protein, 115 aa, synthetic construct
EIVLTQSPDSLAMSLGERATVNCKSSRSLFDSSDNKNYLAWYQKKPGQPPQLLIYWASTRQSGVPDRFSGSGSGTDFTLTISSLQAEDVAVYYCQQYFSSPPIFTFGPGTKVEIK

SEQ ID NO: 501 - protein, 122 aa, synthetic construct
QVQLVQSGAEVKKPGSSVKVSCKASGVTFSSYAISWVRQAPGQGLEWMGGITPMFGTANYAQKFQGRVTITADKSTSTVYMELSSLRSEDTAVYYCARGRGYIAVAGDMDVWGQGTLVTVSS

SEQ ID NO: 502 - protein, 113 aa, synthetic construct
DIQMTQSPDSLAVSLGERATINCKSSRSVLYSSNNKNYLAWYQQKAGQPPKLLIYWASTRESGVPDRFSGSGSGTDFTLTISSLQAEDVAVYYCQQYYSTPPTFGQGTKVEIK

SEQ ID NO: 503 - protein, 124 aa, synthetic construct
QVQLVQSGAEVKKPGSSVKVSCKASGVTFSSYAISWVRQAPGQGLEWMGGISPLFGTANYAQKFQGRVTITADKSTSTAYMELSSLRSEDTAVYYCARGDAYYVGGGARPFDLWGQGTLVTVSS

SEQ ID NO: 504 - protein, 111 aa, synthetic construct
SYELTQPPSVSETPGQNVIISCSGGSSNIGVNYVYWYQVVPGAAPKLLIYRNNQRPSGVPDRFSGSKSGTSASLAISGLQSEDEADYYCGVWDDSLNGHWVFGGGTDLTVL

SEQ ID NO: 505 - protein, 125 aa, synthetic construct
QVQLVQSGAEVKKPGSSVKVSCKASGGPFSSYAISWVRQAPGQGLEWMGGISPMFGTANYAQKFQGRVTITADESTSTVYMELSSLRSEDTAVYYCARGYSYYPGGGGGRNFDYWGQGTLVTVSS

SEQ ID NO: 506 - protein, 110 aa, synthetic construct
LPVLTQPPSASGTPGQRVTISCSGSSSNIGSNTVNWYQQLPGTAPKLLIYSNNQRPSGVPDRFSGSKSGTSASLAISGLQSEGEADYYCAAWDDSLKGRVFGGGTKVTVL

SEQ ID NO: 507 - protein, 124 aa, synthetic construct
QVQLVQSGAEVKKPGSSVKVSCKASGGPFSSYAISWVRQAPGQGLEWMGGISPLFGTANYAQKFQGRVTITADESTSTAYMELSSLRSEDTAVYYCARAPTYYASRDSYNFDYWGQGTLVTVSS

SEQ ID NO: 508 - protein, 108 aa, synthetic construct
ETTLTQSPATLSVSPGERATLSCRASQSVDRGYLAWYQQKPGQAPRLLIYGASHRAAGIPDRFSGSGSGTDFTLTISRLEPEDFAVYFCQQYGSSRLSFGGGTKVEIQ

SEQ ID NO: 509 - protein, 121 aa, synthetic construct
QVQLVQSGAEVKKPGSSVKVSCKASGVTFSSYAISWVRQAPGQGLEWMGGISPMFGTANYAQKFQGRVTITADKSTNTAYMELSSLRSEDTAVYYCARDTTYIAGGHFDVWGQGTLVTVSS

SEQ ID NO: 510 - protein, 110 aa, synthetic construct
QSVLTQPPSASGSPGQSVTISCTGTSSDIGAYNYVSWYQQHPDKAPKLIIYEVSKRPSGVPDRFSGSKSGNTASLTVSGLQAEDEADYYCSSYAGSNNVVFGGGTKLTVL

SEQ ID NO: 511 - protein, 122 aa, synthetic construct
QVQLVQSGAEVKKPGSSVKVSCKASGGTFSSYAISWVRQAPGQGLEWMGGISPLFGTANYAQKFQGRVTITADESTNTAYMELSSLRSEDTAVYYCARASGYFTGWGTFDYWGQGTLVTVSS

SEQ ID NO: 512 - protein, 106 aa, synthetic construct
SYELTQPPSVSVSPGQTARITCSGDALPKQYAYWYQQKPGQAPVLVIYKDSERPSGIPERFSGSNSGNTATLTISGTQALDEADYYCQAWDSSTAVFGTGTKVTVL

SEQ ID NO: 513 - protein, 121 aa, synthetic construct
QVQLVQSGAEVKKPGSSVKVSCKASGGTFSSYAISWVRQAPGQGLEWMGGISPIFGTANYAQKFQGRVTITADKSTSTAYMELSSLRSEDTAVYYCARGRYYYTVGVYDVWGQGTLVTVSS

SEQ ID NO: 514 - protein, 110 aa, synthetic construct
SYELTQPPSVSKGLRQTATLTCIGDSDNVGNQGVGWLQQHQGHPPKLLSYRDNTRPSGISERFSASRSGNTASLTITGLQPEDEADYYCSAWDSSLTAVVFGGGTKLAVL

SEQ ID NO: 515 - protein, 127 aa, synthetic construct
QVQLVQSGAEVKKPGSSVKVSCKASGVTFSSYAISWVRQAPGQGLEWMGGISPIFGTANYAQKFQGRVTITADKSTSTVYMELSSLRSEDTAVYYCARGGGYSADGGAGNNTIFDVWGQGTLVTVSS

SEQ ID NO: 516 - protein, 110 aa, synthetic construct
QPVLTQPPSVSKGLRQTATLTCTGNNNNVGNQGAAWLQQHQGHPPKLLSDRNNNRPSGISERLSASRSGNTASLTITGLQAEDEADYYCSAWDSSLSAWVFGGGTKLTVL

SEQ ID NO: 517 - protein, 122 aa, synthetic construct
QVQLVQSGAEVKKPGSSVKVSCKASGVTFSSYAISWVRQAPGQGLEWMGGISPLFGTANYAQKFQGRVTITADESTSTAYMELSSLRSEDTAVYYCARERGYTVGGGGMDVWGQGTLVTVSS

SEQ ID NO: 518 - protein, 111 aa, synthetic construct
QSALTQPPSASGSPGQSVTISCTGTSSDVGAHNFVSWYQQHPDKAPKLIIYEVNRRPSGVPDRFSGSKSGTSASLAISGLQSDDEADYYCAAWDDSLDGPVFGGGTKLTVL

SEQ ID NO: 519 - protein, 124 aa, synthetic construct
QVQLVQSGAEVKKPGSSVKVSCKASGVTFSSYAISWVRQAPGQGLEWMGGISPIFGTANYAQKFQGRVTITADKSTNTVYMELSSLRSEDTAVYYCAREYLGDDYSSGSYFDVWGQGTLVTVSS

SEQ ID NO: 520 - protein, 107 aa, synthetic construct
ETTLTQSPGTLSLSPGETAILSCRASQSVDSHLAWYQQKGGQAPRLLIYGASTRATGIPARFSGSGSGTDFTLTINGLEPEDFAIYFCQQRSMWPLTFGGGTKVEIK

SEQ ID NO: 521 - protein, 121 aa, synthetic construct
QVQLVQSGAEVKKPGSSVKVSCKASGGTFSSYAISWVRQAPGQGLEWMGGISPMFGTANYAQKFQGRVTITADKSTSTAYMELSSLRSEDTAVYYCARESGYSGTGQFDVWGQGTLVTVSS

SEQ ID NO: 522 - protein, 110 aa, synthetic construct
QSVLTQPPSASGTAGQRVTISCFGRTSNVGRNTVNWYQQLPGAAPKILIFNDNQRPSGVPDRFSGSKSGTAASLTISRLQSADEADYYCSSWDDDLNGPVFGGGTKLSVV

SEQ ID NO: 523 - protein, 122 aa, synthetic construct
QVQLVQSGAEVKKPGSSVKVSCKASGGIFSSYAISWVRQAPGQGLEWMGGISPIFGTANYAQKFQGRVTITADESTNTAYMELSSLRSEDTAVYYCARSGGYYDYGVGYDQWGQGTLVTVSS

SEQ ID NO: 524 - protein, 107 aa, synthetic construct
QPVLTQPPSASGTPGQRVTISCSGGRSNIGSNTVNWYQQLPGTAPKLLIYSNNHRPSGVPDRFSGSKSGNTASLTISGLQAEDEADYYCQSYDSSVVFGGGTKLTVL

SEQ ID NO: 525 - protein, 122 aa, synthetic construct
QVQLVQSGAEVKKPGSSVKVSCKASGGTFSSYAISWVRQAPGQGLEWMGGITPIFGTANYAQKFQGRVTITADESTSTAYMELSSLRSEDTAVYYCARSGGYSPSIGGFDVWGQGTLVTVSS

SEQ ID NO: 526 - protein, 110 aa, synthetic construct
QPGLTQPPSASGTPGQRVTISCSGSRSNIGRNTVNWYQQLPGTAPKLLIYSNNQRPSGVPDRVSGSKSGTSASLAISGLQSEDEADYYCAAWDVSLNGQVFGTGTKVTVL

SEQ ID NO: 527 - protein, 123 aa, synthetic construct
QVQLVQSGAEVKKPGSSVKVSCKASGGTFSSYAISWVRQAPGQGLEWMGGISPIFGTANYAQKFQGRVTITADRSTSTAYMELSSLRSEDTAVYYCARGPGYDPSSLRGFDVWGQGTLVTVSS

SEQ ID NO: 528 - protein, 110 aa, synthetic construct
SYELTQPPSVSKDLRQTATLTCTGNSNNVGNQGAAWLQQHQGHPPKLLFYKNNNRPSGISERLSASRSGNTASLTITGLQPEDEADYYCSAWDSSLSDWVFGGGTKLTVL

SEQ ID NO: 529 - protein, 117 aa, synthetic construct
QVQLVQSGAEVKKPGSSVKVSCKASGGTFSSYAISWVRQAPGQGLEWMGGIIPIFGTANYAQKFQGRVTITADESTNTAYMELSSLRSEDTAVYYCARGEEAYYDLWGQGTLVTVSS

SEQ ID NO: 530 - protein, 107 aa, synthetic construct
EIVLTQSPGTLSLSPGERATLSCWASQSVSSFLAWYQHKPGQVPRLLIYDASNRATGIPARFSGSGSGTHFTLTISSLEPEDFAVYYCQQRFNWPPTFGQGTKVESK

SEQ ID NO: 531 - protein, 122 aa, synthetic construct
QVQLVQSGAEVKKPGSSVKVSCKASGGTFSSYAISWVRQAPGQGLEWMGGITPMFGTANYAQKFQGRVTITADKSTSTAYMELSSLRSEDTAVYYCARGTSYLPGRSGFDVWGQGTLVTVSS

SEQ ID NO: 532 - protein, 107 aa, synthetic construct
QPGLTQPPSVSVSPGQTARITCSADALPKQYAYWYQQRPGQAPVLLIYKDTERPPGIPERFSGSSSGTTVTLTISGVQAEDEADYYCQSADASENSVFGGGTKVTVL

SEQ ID NO: 533 - protein, 122 aa, synthetic construct
QVQLVQSGAEVKKPGSSVKVSCKASGVTFRSYAISWVRQAPGQGLEWMGGISAMFGTANYAQKFQGRVTITADKSTNTAYMELSSLRSEDTAVYYCARGRGYDPSVGGFDVWGQGTLVTVSS

SEQ ID NO: 534 - protein, 110 aa, synthetic construct
NFMLTQPHSVSESPGKTVSISCTGSSGSIASNYVQWYQQRPGSAPATVIYEDNQRPSGVPDRFSGSIDSSSNSASLTISGLKTEDEADYYCQSYDTSNLVFGVGTKLTVL

SEQ ID NO: 535 - protein, 127 aa, synthetic construct
QVQLVQSGAEVKKPGSSVKVSCKASGGTFSSYAISWVRQAPGQGLEWMGGIIPIFGTANYAQKFQGRVTITADDSTSTAYMELSSLRSEDTAVYYCARDSTPSVTSSLYRIPAFDVWGQGTLVTVSS

SEQ ID NO: 536 - protein, 112 aa, synthetic construct
LPVLTQSSSASASLGSSVKLTCSLTNGPSNYIIAWHQQQPEKGPRYLMKLNSDGSHSKGDGIPDRFSGSSSGAERYLTISNLKSEDEADYYCETWDSNTHVVFGGGTKLTVL

SEQ ID NO: 537 - protein, 122 aa, synthetic construct
QVQLVQSGAEVKKPGSSVKVSCKASGGTFSSYAISWVRQAPGQGLEWMGGITPMFGTANYAQKFQGRVTITADKSTSTTYMELSSLRSEDTAVYYCARGPGYYPDSNNYDLWGQGTLVTVSS

SEQ ID NO: 538 - protein, 108 aa, synthetic construct
ETTLTQSPGTLSLSPGERATLSCRASQSVSSSYLAWYQQKPGQAPRLLIYGASSRATGIPDRFSGSGSGTDFTLTISRLEPEDFATYYCQQVNSFPRTFGQGTKLEMK

SEQ ID NO: 539 - protein, 122 aa, synthetic construct
QVQLVQSGAEVKKPGSSVKVSCKASGVTFSSYAISWVRQAPGQGLEWMGGISPMFGTANYAQKFQGRVTITADQSTNTAYMELSSLRSEDTAVYYCARGGTYSPGGTYFDVWGQGTLVTVSS

SEQ ID NO: 540 - protein, 110 aa, synthetic construct
QPVLTQPPSASATPGQTVTISCSGSSSNIGVSFVYWYQQFPGTAPKLLIYRDDMRQSGVPDRFSGFKSGSSASLTISGLQSEDEATYYCSAWDESLSSVLFGGGTKVTVL

SEQ ID NO: 541 - DNA, 351 bp, synthetic construct
  source 1..351: mol_type = other DNA
caggttcaattagtgcagtctggtgctgaagtgaaaaagcccggctcaagtgttaaagtaagctgtaaggcgagcggaggtacttttagctcatacgccattagctgggtgcgacaggctcctggtcagggcctcgaatggatgggcggcattatcacaatctttggtactgcaaattatgcccagaaatttcagggtagagtcacaattaccgcagacaaaagtacctcaaccgcatacatggaactgagtagcctgcgttccgaagatacagctgtgtattactgtgcgcgcggtgctacaggtttctacgacgtttggggccaggggaccttagtcactgtgtctagc

SEQ ID NO: 542 - DNA, 331 bp, synthetic construct
  source 1..331: mol_type = other DNA
ctgcctgtgctgactcagccaccctcagcgtctgggacccccgggcagagggtcaccatctcttgttctggaagcagctccaacatcggaagtaatactgtaaactggtaccagcagctcccaggaacggcccccaaactcctcatctatagtaataatcagcggccctcaggggtccctgaccgattctctggctccaagtctggcacctcagcctccctggccatcagtgggctccagtctgaggatgaggctgattattactgtgcagcatgggatgacagcctgaatggtccggtattcggcggagggaccaagctgaccgtcctag

SEQ ID NO: 543 - DNA, 369 bp, synthetic construct
  source 1..369: mol_type = other DNA
caggttcaattagtgcagtctggtgctgaagtgaaaaagcccggctcaagtgttaaagtaagctgtaaggcgagcggagttactttcagctcatacgccattagctgggtgcgacaggctcctggtcagggcctcgaatggatgggcggcattagccctatcttcggcactgcaaattatgcccagaaatttcagggtagagtcacaattaccgcagatgaaagcacgtcaactgcatacatggaactgagtagcctgcgttccgaagatacagctgtgtattactgtgcgcgcggtcgtgagtactacgctagtaatggtgacagtttcgatgtttggggccaggggaccttagtcactgtgtctagc

SEQ ID NO: 544 - DNA, 328 bp, synthetic construct
  source 1..328: mol_type = other DNA
cagcctgtgctgactcagccaccctcggtgtcagtggccccaggaaagacggccagcatttcctgtgagggaaacaacattgcgactaaaagtgtgcactggtaccagcagaagtcaggccacgcccctgtggtggtcgtctatcatgatagcgaccggccctcaggggtccctgaccgattctctggctccaagtctggcacctcagcctccctggccatcagtgggctccggtccgaggatgaggctgattattactgtgcagcatgggatgacagcctgagtggtccttgggtgttcggcggagggaccaagctgaccgtcctag

SEQ ID NO: 545 - DNA, 369 bp, synthetic construct
  source 1..369: mol_type = other DNA
caggttcaattagtgcagtctggtgctgaagtgaaaaagcccggctcaagtgttaaagtaagctgtaaggcgagcggaggtacctttagttcatacgccattagctgggtgcgacaggctcctggtcagggcctcgaatggatgggcggcattagcgcaatcttcggcactgcaaattatgcccagaaatttcagggtagagtcacaattaccgcagatgagagcacgcgcaccgcatacatggaactgagtagcctgcgttccgaagatacagctgtgtattactgtgcgcgcggtagtggttactacgttgctgctagtggtgctttcgacgtgtggggccaggggaccttagtcactgtgtctagc

SEQ ID NO: 546 - DNA, 331 bp, synthetic construct
  source 1..331: mol_type = other DNA
cagcctgggctgactcagccaccctcggtgtcaaagggcttgagacagaccgccacactcacctgcactgggaacatcaacaatgttggcgaccaaggagcaggttggctgcagcagcaccagggccgccctcccaaactcctgtcgtacaggaatagcaaccggccctcaggtgtctcagagagattctctgcatccaggtcaggaaatacagcctccctgaccattactggactccagcctgaggacgaggctgactattactgctcagcatgggacagcagcctcagtgattgggtgttcggcggagggaccaagctgaccgtcctag

SEQ ID NO: 547 - DNA, 381 bp, synthetic construct
  source 1..381: mol_type = other DNA
caggttcaattagtgcagtctggtgctgaagtgaaaaagcccggctcaagtgttaaagtaagctgtaaggcgagcggtggcatcttcagctcatacgccattagctgggtgcgacaggctcctggtcagggcctcgaatggatgggcggcatcaccccaatcttcggcactgcaaattatgcccagaaatttcagggtagagtcacaattaccgcagacgaaagcacgcgtaccgcatatatggaactgagtagcctgcgttccgaagatacagctgtgtattactgtgcgcgcgacctgagtcgtgacagtctgaatctgcctggtagtagtcctggttacgatctctggggccaggggaccttagtcactgtgtctagc

SEQ ID NO: 548 - DNA, 322 bp, synthetic construct
  source 1..322: mol_type = other DNA
gaaacgacactcacgcagtctccaggcaccctgtctttgtctccaggagaaagagccaccctctcctgcagggccagtcagagtgttagcagcaacttagcctggtaccagcagaaacctggccaggctcccaggctcctcatctatggtgcatccaccagggccactggtatcccagccaggttcagtggcagtgggtctgggacagagttcactctcaccatcagcagcctgcagtctgaagattttgcagtgtattactgtcagcagtatagtagttctccctacacttttggccaggggaccaaactggagatcaaac

SEQ ID NO: 549 - DNA, 369 bp, synthetic construct
  source 1..369: mol_type = other DNA
caggttcaattagtgcagtctggtgctgaagtgaaaaagcccggctcaagtgttaaagtaagctgtaaggcgagcggagtgattttcagctcatacgccattagctgggtgcgacaggctcctggtcagggcctcgaatggatgggcggcattagccctatcttcggcactgcaaattatgcccagaaatttcagggtagagtcacaattaccgcagatgagagcacgtcaaccgcatatatggaactgagtagcctgcgttccgaagatacagctgtgtattactgtgcgcgcagtcgtggttacgctcctggtacaagtttccactacgatgtgtggggccaggggaccttagtcactgtgtctagc

SEQ ID NO: 550 - DNA, 325 bp, synthetic construct
  source 1..325: mol_type = other DNA
ctgcctgtgctgactcaggcaccctcaatgtcagtggccccaggaaagacggccagtattacctgtgggggagacaacattggaagtaaaagtgtgcactggtaccagcagaagccaggccaggcccctgtgctggtcatgtattatgatagcgaccggccctcagggatccctgagcgattctctggctccaactctgggaacacggccaccctgaccatcagcagggtcgaggccggggatgaggccgactatttctgccagctgtgggatcatactaattctcatgtggtcttcggcggaaggaccaaactgaccgtcctag

SEQ ID NO: 551 - DNA, 363 bp, synthetic construct
  source 1..363: mol_type = other DNA
caggttcaattagtgcagtctggtgctgaagtgaaaaagcccggctcaagtgttaaagtaagctgtaaggcgagcggtggcacctttagttcttacgccattagctgggtgcgacaggctcctggtcagggcctcgaatggatgggcggcattagcccaatctttggcactgcaaattatgcccagaaatttcagggtagagtcacaattacctcagatgagagtaccagcactgcatacatggaactgagtagcctgcgttccgaagatacagctgtgtattactgtgcgcgcgaccaaggtggtacacgtggtaattacttcgacgtttggggccaggggaccttagtcactgtgtctagc

SEQ ID NO: 552 - DNA, 331 bp, synthetic construct
  source 1..331: mol_type = other DNA
cagcctgtgctgactcagccaccctcggtgtccaagggcttgagacagaccgccacagtcacctgcactgggaacagcaacaatgttggcaaccaaggagcagcttggctgcagcagcaccagggccaccctcccaaactcctatcctacaggaataacaaccggccctcagggatttcagagagattatctgcatccaggtcaggaaacacagcctccctgaccattgctggactccagcctgaggacgaggctgactattactgctcagcatgggacaacaccgtcagtggttgggtgttcggcggagggaccagggtgaccgtcctag

SEQ ID NO: 553 - DNA, 351 bp, synthetic construct
  source 1..351: mol_type = other DNA
caggttcaattagtgcagtctggtgctgaagtgaaaaagcccggctcaagtgttaaagtaagctgtaaggcgagcggtggtactttcagttcatacgccattagctgggtgcgacaggctcctggtcagggcctcgaatggatgggcggcattatcacaatcttcggtactgcaaattatgcccagaaatttcagggtagagtcacaattaccgcagatgagagcacgaacaccgcctacatggaactgagtagcctgcgttccgaagatacagctgtgtattactgtgcgcgcggtggtggtggtcgttttgacgtttggggccaggggaccttagtcactgtgtctagc

SEQ ID NO: 554 - DNA, 331 bp, synthetic construct
  source 1..331: mol_type = other DNA
tcctatgagctgactcagccaccctcagtgtctgggacccccgggcagagggtcaccatctcttgttctggaagcacctccaacatcggaaataatgctctaaactggtaccagaaactcccagggacggcccccaaactcctcatctatagtcttaatcagcgtccctcaggggtccctgaccgattctctggctccaagtctggcacctcagcctccctggccatcagtgggctccagtctgaggatgaggctgattattactgtgaagcatgggatgacagcctgagtggtccggtgttcggcggagggaccaaggtgaccgtcctag

SEQ ID NO: 555 - DNA, 351 bp, synthetic construct
  source 1..351: mol_type = other DNA
caggttcaattagtgcagtctggtgctgaagtgaaaaagcccggctcaagtgttaaagtaagctgtaaggcgagcggaggtccatttcgctcatacgccattagctgggtgcgacaggctcctggtcagggcctcgaatggatgggcggcattatcccaatcttcggcactgcaaattatgcccagaaatttcagggtagagtcacaattaccgcagatgaaagtacgtcaactgcatacatggaactgagtagcctgcgttccgaagatacagctgtgtattactgtgcgcgcggtggtgtttacagttttgatgtgtggggccaggggaccttagtcactgtgtctagc

SEQ ID NO: 556 - DNA, 331 bp, synthetic construct
  source 1..331: mol_type = other DNA
cagtctgggctgactcagccaccctcagcgtctgggacccccgggcagagggtcaccatttcttgttctggaagcggctccaacgtcggaagtaatgttgtaaattggtaccagcatctcccaggaacggcccccaaactcctcatctatcgtaataatcagcggccctcaggggtccctgaccgattctctggctccaagtctggcacctcagcctccctggccatcagtgggctccagtctgaggatgaggctgattattattgtgcagcatgggatgacagactgaatggctttgtctttggtactgggacgaaggtcaccgtcctga

SEQ ID NO: 557 - DNA, 375 bp, synthetic construct
  source 1..375: mol_type = other DNA
caggttcaattagtgcagtctggtgctgaagtgaaaaagcccggctcaagtgttaaagtaagctgtaaggcgagcggtgttcctttcagttcttacgccattagctgggtgcgacaggctcctggtcagggcctcgaatggatgggcggcatcagcccactgtttggtactgcaaattatgcccagaaatttcagggtagagtcacaattaccgcagaccagagcacgtcaaccgtctacatggaactgagtagcctgcgttccgaagatacagctgtgtattactgtgcgcgcggtctgggtacatacagtcctagtctgtaccctcgtggtatggacgtttggggccaggggaccttagtcactgtgtctagc

SEQ ID NO: 558 - DNA, 331 bp, synthetic construct
  source 1..331: mol_type = other DNA
ctgcctgtgctgactcagccaccctcagcgtctgggacccccggacagagtgtcaccatctcttgttctggaagcagctccaacatcggcagaaatgatgttaactggtaccagcaattcccgggaagggcccccaaactcctcatctatggtcgtgatgagcggcccttcggggtccctgcccgattctctggctccaagtctggcacctcagcctccctggccatcagtgggctccagtctgaggatgaggctgattattactgtgctgcatgggatgccagtctgatgatctatgtcttcggaactgggaccacggtcaccgtcctgg

SEQ ID NO: 559 - DNA, 366 bp, synthetic construct
  source 1..366: mol_type = other DNA
caggttcaattagtgcagtctggtgctgaagtgaaaaagcccggctcaagtgttaaagtaagctgtaaggcgagcggagtgacctttagttcatacgccattagctgggtgcgacaggctcctggtcagggcctcgaatggatgggcggcatcagccctatgttcggcactgcaaattatgcccagaaatttcagggtagagtcacaattaccgcagacgaaagtacgaatactgtctatatggaactgagtagcctgcgttccgaagatacagctgtgtattactgtgcgcgcggtcgtgcttacctgagtgttcgtggtagtttcgacgtgtggggccaggggaccttagtcactgtgtctagc

SEQ ID NO: 560 - DNA, 331 bp, synthetic construct
  source 1..331: mol_type = other DNA
tcctatgagctgactcagccaccctcagtgtctgggacccccgggcagagggtcaccatctcttgttctggaagcagctccaacatcggaagtaacactgtaaactggtaccagcagctcccaggaacggcccccaaactcctcatctatagtaataatcagcggccctcaggggtccctgaccgattctctggctccaagtctggcacctcagcctccctggccatcagtgggctccagtctgaggatgaggctgattattactgtgcagcatgggatgacagcctgaatggttatgtcttcggaactgggaccaaggtcaccgtcctag

SEQ ID NO: 561 - DNA, 351 bp, synthetic construct
  source 1..351: mol_type = other DNA
caggttcaattagtgcagtctggtgctgaagtgaaaaagcccggctcaagtgttaaagtaagctgtaaggcgagcggtgtgattttcagttcttacgccattagctgggtgcgacaggctcctggtcagggcctcgaatggatgggcggcatcatcccaatctttggcactgcaaattatgcccagaaatttcagggtagagtcacaattaccgcagataaaagtacgtcaactgcctatatggaactgagtagcctgcgttccgaagatacagctgtgtattactgtgcgcgcggtggtagtggtagtttcgacgtttggggccaggggaccttagtcactgtgtctagc

SEQ ID NO: 562 - DNA, 331 bp, synthetic construct
  source 1..331: mol_type = other DNA
cagcctgggctgactcagccaccctcagcgtctgggacccccgggcagagggtcaccatctcttgttctggaagcagttccaacctcggaagtaattatgtcttctggtaccagcacctcccaggagcggcccccaaactcctcatctatagaaatagtcagcggccctctggggtccctgaccgattctctggctccaagtctggcacctcagcctccctggccatcagtgggctccagtctgaggatgaggctgattattactgtgcagcatgggatgacagcctgaatggtgtggtattcggcggagggaccaagctgaccgtcctag

SEQ ID NO: 563 - DNA, 375 bp, synthetic construct
  source 1..375: mol_type = other DNA
caggttcaattagtgcagtctggtgctgaagtgaaaaagcccggctcaagtgttaaagtaagctgtaaggcgagcggagtgactttcagctcttacgccattagctgggtgcgacaggctcctggtcagggcctcgaatggatgggcggcatcagccctgtgtttggtactgcaaattatgcccagaaatttcagggtagagtcacaattaccgcagatgatagtacgaataccgcctacatggaactgagtagcctgcgttccgaagatacagctgtgtattactgtgcgcgcagtcgtggttacacagttagtagtctggctggtcgttacttcgaccagtggggccaggggaccttagtcactgtgtctagc

SEQ ID NO: 564 - DNA, 325 bp, synthetic construct
  source 1..325: mol_type = other DNA
gaaacgacactcacgcagtctccaggcaccctgtccttgtctccaggggaaagagcctccctctcctgcaaggccagtgagagtctttgcagcacttgcttggcctggtaccagcagaaacctggccaggctcccaggctcatcgtctatggtgcaaccagcagggccactggcatcccagacaggttcagtggcagtgggtctgggacagacttcactctcaccatcagcagactggagcctgaagattttgcagtgtattactgtcagcagtatggtagctcacctcagacgttcggccaagggaccaaggtggaaatcaaac

SEQ ID NO: 565 - DNA, 351 bp, synthetic construct
  source 1..351: mol_type = other DNA
caggttcaattagtgcagtctggtgctgaagtgaaaaagcccggctcaagtgttaaagtaagctgtaaggcgagcggaggcacttttagctcatacgccattagctgggtgcgacaggctcctggtcagggcctcgaatggatgggcggcatcgtgccactgtttggcactgcaaattatgcccagaaatttcagggtagagtcacaattaccgcagacgaaagtaccagcactgcatatatggaactgagtagcctgcgttccgaagatacagctgtgtattactgtgcgcgcggtctgggtctgtactttgacgtgtggggccaggggaccttagtcactgtgtctagc

SEQ ID NO: 566 - DNA, 328 bp, synthetic construct
  source 1..328: mol_type = other DNA
cagactgtggtgactcaggagccctcactgactgtgtccccaggagagacagtcactctcacctgtgcttccagcactggagcagtcaccagtggttactatccaaactggttccagcagaaacctggacaagcacccagggcactgatttatagtacaagcaacaaacactcctggacccctgcccggttctcaggctccctccttgggggcaaagctgccctgacactgtcaggtgtgcagcctgaggacgaggctgagtattattgtctgctctactatggtggtccttgggtgttcggcggagggaccaagttgaccgtcctgg

SEQ ID NO: 567 - DNA, 366 bp, synthetic construct
  source 1..366: mol_type = other DNA
caggttcaattagtgcagtctggtgctgaagtgaaaaagcccggctcaagtgttaaagtaagctgtaaggcgagcggtggtactttcagctcatacgccattagctgggtgcgacaggctcctggtcagggcctcgaatggatgggcggcattatcccaatcttcggtactgcaaattatgcccagaaatttcagggtagagtcacaattaccgcagacgaaagcacgaacaccgcctacatggaactgagtagcctgcgttccgaagatacagctgtgtattactgtgcgcgcgttcgtggtggttacggtccttacggtgactttgacgtttggggccaggggaccttagtcactgtgtctagc

SEQ ID NO: 568 - DNA, 331 bp, synthetic construct
  source 1..331: mol_type = other DNA
cagcctgggctgactcagccaccctcagcgtctgggacccccgggcagagggtcaccatctcttgttctggaagcagctccaacatcggaagtcattctgtgaactggtaccggcagctcccaggaacggccccccaactcctcatctatggtaacagcaatcggccctcaggggtccctgaccgattctctggctccaagtctggcacctcagcgtccctggccatcagtgggctccagtctgaggatgaggctgattatttctgtgcggcatgggatgacggcctgagtggttgggtgttcggcggagggaccaaattgaccgtcctag

SEQ ID NO: 569 - DNA, 369 bp, synthetic construct
  source 1..369: mol_type = other DNA
caggttcaattagtgcagtctggtgctgaagtgaaaaagcccggctcaagtgttaaagtaagctgtaaggcgagcggtggcccttttagctcatacgccattagctgggtgcgacaggctcctggtcagggcctcgaatggatgggcggcattagcccaatcttcggcactgcaaattatgcccagaaatttcagggtagagtcacaattaccgcagataagagtacgaacaccgcatacatggaactgagtagcctgcgttccgaagatacagctgtgtattactgtgcgcgcggtcgtagttacatcgttagtgttagtcctggttttgacgtgtggggccaggggaccttagtcactgtgtctagc

SEQ ID NO: 570 - DNA, 334 bp, synthetic construct
  source 1..334: mol_type = other DNA
cagtctgtgctgactcagccaccctccgcgtccgggtctcctggacagtcagtcaccatctcctgcactggaaccagcagtgacgttggtggttataactatgtctcctggtaccaacagtacccaggcaaagcccccaaactcatgatttatgaggtcagtaagcggccctcaggggtccctgatcgtttctctggctccaagtctggcacctcagcctccctggccatcagtgagctccaatctgaggatgaggctgattattactgtgcatcatgggatgacagcctgaatgcttatgtcttcggaagtgggaccaaggtcaccgtcctgg

SEQ ID NO: 571 - DNA, 369 bp, synthetic construct
  source 1..369: mol_type = other DNA
caggttcaattagtgcagtctggtgctgaagtgaaaaagcccggctcaagtgttaaagtaagctgtaaggcgagcggaggcattttcagttcatacgccattagctgggtgcgacaggctcctggtcagggcctcgaatggatgggcggcatcagcgcaatctttggtactgcaaattatgcccagaaatttcagggtagagtcacaattaccgcagatgagagtaccagcaccgcatatatggaactgagtagcctgcgttccgaagatacagctgtgtattactgtgcgcgcgacagtggtatcgctagtggttacacagcttacatggattattggggccaggggaccttagtcactgtgtctagc

SEQ ID NO: 572 - DNA, 325 bp, synthetic construct
  source 1..325: mol_type = other DNA
tcttctgagctgactcaggaccctgctgtgtctgtggccttgggacagacagtcaggatcacatgccaaggagacagcctcagaacctcttacgcaagctggtaccagcagaagccaggccagtcccctgtactggtcatctatcaaagtactaagcggccctcagggatccctgagcgattctctgcctccagctcaggaaacacagcttccctgaccatcactggggctcaggcggaagatgaggctgactattactgtaactcccggggcagcgggggtaacccctatgtcttcggaactgggaccaaggtcaccgtccttg

SEQ ID NO: 573 - DNA, 351 bp, synthetic construct
  source 1..351: mol_type = other DNA
caggttcaattagtgcagtctggtgctgaagtgaaaaagcccggctcaagtgttaaagtaagctgtaaggcgagcggtggcattttccgttcatacgccattagctgggtgcgacaggctcctggtcagggcctcgaatggatgggcggcattatcccaatgttcggtactgcaaattatgcccagaaatttcagggtagagtcacaattaccgcagatgagagtacgactactgtctatatggaactgagtagcctgcgttccgaagatacagctgtgtattactgtgcgcgcggtgctggtagtacatttgatgtgtggggccaggggaccttagtcactgtgtctagc

SEQ ID NO: 574 - DNA, 331 bp, synthetic construct
  source 1..331: mol_type = other DNA
cagtctgtgctgactcagccaccctcagcgtctgggacccccgggcagagggtcaccatctcttgttctggaagcagctccaacatcggaagtaatactgtaaactggtaccagcagctcccaggaacggcccccagactcctcatctatagtaataatcagcggccctcaggggtccctgaccgattctctggctccaagtctggcacctcagcctccctggccatcagtgggctccagtctgaggatgaggctgattattactgtgcagcatgggatgacagcctgaatggtcgggtgttcggcggagggaccaagctgaccgtcctag

SEQ ID NO: 575 - DNA, 363 bp, synthetic construct
  source 1..363: mol_type = other DNA
caggttcaattagtgcagtctggtgctgaagtgaaaaagcccggctcaagtgttaaagtaagctgtaaggcgagcggtggtaccttcagctcatacgccattagctgggtgcgacaggctcctggtcagggcctcgaatggatgggcggcattaaccctatctttggtactgcaaattatgcccagaaatttcagggtagagtcacaattaccgcagatgagagcacgaatactgcctacatggaactgagtagcctgcgttccgaagatacagctgtgtattactgtgcgcgcggtgagagtgcttactacagtcgtaattacgatgtgtggggccaggggaccttagtcactgtgtctagc

SEQ ID NO: 576 - DNA, 331 bp, synthetic construct
  source 1..331: mol_type = other DNA
tcctatgagctgactcagccaccctcggtgtccaagggcttgagacagaccgccacactcacctgcactgggaacagcagcaatgttggcaaccaaggagcatcttggctgcagcagcaccagggccaccctcccaaactcctatcctacaggaatgacaaccggccctcagggatctcagagagattctctgcatccaggtcaggaaatacagcctccctgaccattactggactccagcctgaggacgaggctgactattactgctcagcatgggacaacagcctcagtgcttgggtgttcggtggagggaccaagctgaccgtcctag

SEQ ID NO: 577 - DNA, 369 bp, synthetic construct
  source 1..369: mol_type = other DNA
caggttcaattagtgcagtctggtgctgaagtgaaaaagcccggctcaagtgttaaagtaagctgtaaggcgagcggtgtgacttttagctcatacgccattagctgggtgcgacaggctcctggtcagggcctcgaatggatgggcggcatcagcccaatgttcggcactgcaaattatgcccagaaatttcagggtagagtcacaattaccgcagatgagagcacgaataccgcatatatggaactgagtagcctgcgttccgaagatacagctgtgtattactgtgcgcgcggtggtggttactaccctgctggtgttggtcgttatgatgtttggggccaggggaccttagtcactgtgtctagc

SEQ ID NO: 578 - DNA, 340 bp, synthetic construct
  source 1..340: mol_type = other DNA
gacatcgtgatgacccagtctccagactccctggctgtgtctctgggcgagagggccaccatcaactgcaagtccagccagaatgttttatacagctccaacaataagaataacttagcttggtaccaacaaagaccaggacagcctcctaaagtgctcctttattgggcatctacccgggcatccggggtccctgaccgattcagtggcagcgggtctgggacagatttcactctcaccatcaacagccttcaggctgaagatgtggcactttattactgtcaacaatattatggtaaacccttcactttcggccctgggaccaaagtggagatcaaac

SEQ ID NO: 579 - DNA, 363 bp, synthetic construct
  source 1..363: mol_type = other DNA
caggttcaattagtgcagtctggtgctgaagtgaaaaagcccggctcaagtgttaaagtaagctgtaaggcgagcggaggtacctttagctcatacgccattagctgggtgcgacaggctcctggtcagggcctcgaatggatgggcggcattacccctctgttcggcactgcaaattatgcccagaaatttcagggtagagtcacaattaccgcagacgatagtacgtcaactgcatatatggaactgagtagcctgcgttccgaagatacagctgtgtattactgtgcgcgcggtcctacactgtacagtcctcctgtttttgatgtgtggggccaggggaccttagtcactgtgtctagc

SEQ ID NO: 580 - DNA, 331 bp, synthetic construct
  source 1..331: mol_type = other DNA
cagactgtggtgactcaggagccatcgttctcagtgtcccctggagggacaatcaccctcacttgtggcttgagttctggctcagtctctactactaattatcccagctggtaccagcagaccccaggccgaactccacgcacgctcatctacaacacaaacactcgctcttctggggtccctgatcgcttctctggctccatccttgggaacaaagctgccctcaccatcacgggggcccaggcaggtgatgaatctgattattactgtgttttatatatgggtcgtggcatttatgtcttcggaagtgggaccaaggtctccgtcctgg

SEQ ID NO: 581 - DNA, 369 bp, synthetic construct
  source 1..369: mol_type = other DNA
caggttcaattagtgcagtctggtgctgaagtgaaaaagcccggctcaagtgttaaagtaagctgtaaggcgagcggaggcacttttcgctcttacgccattagctgggtgcgacaggctcctggtcagggcctcgaatggatgggcggcatcatgccaatctttggtactgcaaattatgcccagaaatttcagggtagagtcacaattaccgcagacgagagtacgacaaccgtgtacatggaactgagtagcctgcgttccgaagatacagctgtgtattactgtgcgcgcggtgctggtgttagtgctggtcctagttggccttttgacgtttggggccaggggaccttagtcactgtgtctagc

SEQ ID NO: 582 - DNA, 331 bp, synthetic construct
  source 1..331: mol_type = other DNA
cagcctgggctgactcagccaccctcggtgtccaaggacttgaggcagaccgccacactcacctgcactgggaacagcaacaatgttggcaaacaaggagctacttggctgcagcagcaccagggccaccctcccaaactcctatcctacaggaataacaaccggccctcagggatctcagagagattctctgcatccaggtcaggagacacagcctccctgaccattactggcctccagcctgaggacgaggctgactattactgctcagcatgggacagcagcctcagtgtatgggtgttcggcggagggaccaagctgaccgtcctag

SEQ ID NO: 583 - DNA, 369 bp, synthetic construct
  source 1..369: mol_type = other DNA
caggttcaattagtgcagtctggtgctgaagtgaaaaagcccggctcaagtgttaaagtaagctgtaaggcgagcggtggtaccttcagctcatacgccattagctgggtgcgacaggctcctggtcagggcctcgaatggatgggcggcattagccctatgtttggtactgcaaattatgcccagaaatttcagggtagagtcacaattaccgcagatgagagcacgtcaaccgtgtacatggaactgagtagcctgcgttccgaagatacagctgtgtattactgtgcgcgcagtcgtggttacaatgttgctgctagtttcggtttcgatgtgtggggccaggggaccttagtcactgtgtctagc

SEQ ID NO: 584 - DNA, 322 bp, synthetic construct
  source 1..322: mol_type = other DNA
gaaattgtgttgacgcagtctccatccttcctgtctgcatctgtaggagacagagtcaccatcacttgccgggccagtcagtacattgatcgtagcttacactggtaccagcagaaaccagatcagtctccaaagctcctcatcaagtatgcttctcagtccatctcaggggtcccctcgaggttcagtggcagtggatctgggacagatttcagcctcaccatcaatagcctggaaactgaagatgctgcaacctattactgccatcagaccagtagtttgccgtggacattcggccaagggaccacggtggaaatcaaac

SEQ ID NO: 585 - DNA, 363 bp, synthetic construct
  source 1..363: mol_type = other DNA
caggttcaattagtgcagtctggtgctgaagtgaaaaagcccggctcaagtgttaaagtaagctgtaaggcgagcggtggcccatttagctcatacgccattagctgggtgcgacaggctcctggtcagggcctcgaatggatgggcggcatcatccctatcttcggcactgcaaattatgcccagaaatttcagggtagagtcacaattaccgcagatgaaagtacgtcaaccgcctatatggaactgagtagcctgcgttccgaagatacagctgtgtattactgtgcgcgcggtacagactacagtggttaccgtggttttgacgtttggggccaggggaccttagtcactgtgtctagc

SEQ ID NO: 586 - DNA, 331 bp, synthetic construct
  source 1..331: mol_type = other DNA
cagactgtggtgactcaggagccatcgttctcagtgtcccctggagggacagtcacactcacctgtgctttgagttctggctcagtctccagttttaactacgccagctggtaccagcagaccccaggccaggcgccacgcacactcatctccaacacaaacactcgctcttctggggtccctgatcgcttctctggctccatccttgggaacaaagctaccctcaccatcacgggggcccaggcagatgatgaatctcattattactgtgcactgtatgtgggtggtggcatttccgtgttcggcggagggaccaagttgaccgtcctag

SEQ ID NO: 587 - DNA, 348 bp, synthetic construct
  source 1..348: mol_type = other DNA
caggttcaattagtgcagtctggtgctgaagtgaaaaagcccggctcaagtgttaaagtaagctgtaaggcgagcggtgttacttttagctcatacgccattagctgggtgcgacaggctcctggtcagggcctcgaatggatgggcggcatcaccccaatctttggcactgcaaattatgcccagaaatttcagggtagagtcacaattaccgcagatcagagtacgagcactgcatacatggaactgagtagcctgcgttccgaagatacagctgtgtattactgtgcgcgcggtggtggtgttttcgacgtttggggccaggggaccttagtcactgtgtctagc

SEQ ID NO: 588 - DNA, 331 bp, synthetic construct
  source 1..331: mol_type = other DNA
tcctatgagctgactcagccaccctcggtgtctggagccccccgacagagggtcaccatctcctgttctggaagcagctccaacatcggaaataatgctgtaaactggtaccagcagctcccaggaaaggctcccaaactcctcatctattatgatgatatgctgccctcaggggtctctgaccgattctctggctccaagtctggctcctcagcctccctggccatcagtgggctccagtctgaggatgaggctgactattattgtgcagcatgggatgacagcctgagcggtccggttttcggcggagggaccaacctgaccgtcctag

SEQ ID NO: 589 - DNA, 366 bp, synthetic construct; identical to SEQ ID NO: 413
  source 1..366: mol_type = other DNA

SEQ ID NO: 590 - DNA, 331 bp, synthetic construct; identical to SEQ ID NO: 414
  source 1..331: mol_type = other DNA

SEQ ID NO: 591 - DNA, 363 bp, synthetic construct; identical to SEQ ID NO: 417
  source 1..363: mol_type = other DNA

SEQ ID NO: 592 - DNA, 334 bp, synthetic construct; identical to SEQ ID NO: 418
  source 1..334: mol_type = other DNA

SEQ ID NO: 593 - DNA, 375 bp, synthetic construct; identical to SEQ ID NO: 425
  source 1..375: mol_type = other DNA

SEQ ID NO: 594 - DNA, 331 bp, synthetic construct; identical to SEQ ID NO: 426
  source 1..331: mol_type = other DNA

SEQ ID NO: 595 - DNA, 369 bp, synthetic construct; identical to SEQ ID NO: 427
  source 1..369: mol_type = other DNA

SEQ ID NO: 596 - DNA, 346 bp, synthetic construct; identical to SEQ ID NO: 428
  source 1..346: mol_type = other DNA

SEQ ID NO: 597 - DNA, 375 bp, synthetic construct; identical to SEQ ID NO: 433
  source 1..375: mol_type = other DNA

SEQ ID NO: 598 - DNA, 331 bp, synthetic construct; identical to SEQ ID NO: 434
  source 1..331: mol_type = other DNA

SEQ ID NO: 599 - DNA, 366 bp, synthetic construct; identical to SEQ ID NO: 451
  source 1..366: mol_type = other DNA

SEQ ID NO: 600 - DNA, 322 bp, synthetic construct; identical to SEQ ID NO: 452
  source 1..322: mol_type = other DNA

SEQ ID NO: 601 - protein, 117 aa, synthetic construct
QVQLVQSGAEVKKPGSSVKVSCKASGGTFSSYAISWVRQAPGQGLEWMGGIITIFGTANYAQKFQGRVTITADKSTSTAYMELSSLRSEDTAVYYCARGATGFYDVWGQGTLVTVSS

SEQ ID NO: 602 - protein, 110 aa, synthetic construct
LPVLTQPPSASGTPGQRVTISCSGSSSNIGSNTVNWYQQLPGTAPKLLIYSNNQRPSGVPDRFSGSKSGTSASLAISGLQSEDEADYYCAAWDDSLNGPVFGGGTKLTVL

SEQ ID NO: 603 - protein, 123 aa, synthetic construct
QVQLVQSGAEVKKPGSSVKVSCKASGVTFSSYAISWVRQAPGQGLEWMGGISPIFGTANYAQKFQGRVTITADESTSTAYMELSSLRSEDTAVYYCARGREYYASNGDSFDVWGQGTLVTVSS

SEQ ID NO: 604 - protein, 109 aa, synthetic construct
QPVLTQPPSVSVAPGKTASISCEGNNIATKSVHWYQQKSGHAPVVVVYHDSDRPSGVPDRFSGSKSGTSASLAISGLRSEDEADYYCAAWDDSLSGPWVFGGGTKLTVL

SEQ ID NO: 605 - protein, 123 aa, synthetic construct
QVQLVQSGAEVKKPGSSVKVSCKASGGTFSSYAISWVRQAPGQGLEWMGGISAIFGTANYAQKFQGRVTITADESTRTAYMELSSLRSEDTAVYYCARGSGYYVAASGAFDVWGQGTLVTVSS

SEQ ID NO: 606 - protein, 110 aa, synthetic construct
QPGLTQPPSVSKGLRQTATLTCTGNINNVGDQGAGWLQQHQGRPPKLLSYRNSNRPSGVSERFSASRSGNTASLTITGLQPEDEADYYCSAWDSSLSDWVFGGGTKLTVL

SEQ ID NO: 607 - protein, 127 aa, synthetic construct
QVQLVQSGAEVKKPGSSVKVSCKASGGIFSSYAISWVRQAPGQGLEWMGGITPIFGTANYAQKFQGRVTITADESTRTAYMELSSLRSEDTAVYYCARDLSRDSLNLPGSSPGYDLWGQGTLVTVSS

SEQ ID NO: 608 - protein, 107 aa, synthetic construct
ETTLTQSPGTLSLSPGERATLSCRASQSVSSNLAWYQQKPGQAPRLLIYGASTRATGIPARFSGSGSGTEFTLTISSLQSEDFAVYYCQQYSSSPYTFGQGTKLEIK

SEQ ID NO: 609 - protein, 123 aa, synthetic construct
QVQLVQSGAEVKKPGSSVKVSCKASGVIFSSYAISWVRQAPGQGLEWMGGISPIFGTANYAQKFQGRVTITADESTSTAYMELSSLRSEDTAVYYCARSRGYAPGTSFHYDVWGQGTLVTVSS

SEQ ID NO: 610 - protein, 108 aa, synthetic construct
LPVLTQAPSMSVAPGKTASITCGGDNIGSKSVHWYQQKPGQAPVLVMYYDSDRPSGIPERFSGSNSGNTATLTISRVEAGDEADYFCQLWDHTNSHVVFGGRTKLTVL

SEQ ID NO: 611 - protein, 121 aa, synthetic construct
QVQLVQSGAEVKKPGSSVKVSCKASGGTFSSYAISWVRQAPGQGLEWMGGISPIFGTANYAQKFQGRVTITSDESTSTAYMELSSLRSEDTAVYYCARDQGGTRGNYFDVWGQGTLVTVSS

SEQ ID NO: 612 - protein, 110 aa, synthetic construct
QPVLTQPPSVSKGLRQTATVTCTGNSNNVGNQGAAWLQQHQGHPPKLLSYRNNNRPSGISERLSASRSGNTASLTIAGLQPEDEADYYCSAWDNTVSGWVFGGGTRVTVL

SEQ ID NO: 613 - protein, 117 aa, synthetic construct
QVQLVQSGAEVKKPGSSVKVSCKASGGTFSSYAISWVRQAPGQGLEWMGGIITIFGTANYAQKFQGRVTITADESTNTAYMELSSLRSEDTAVYYCARGGGGRFDVWGQGTLVTVSS

SEQ ID NO: 614 - protein, 110 aa, synthetic construct
SYELTQPPSVSGTPGQRVTISCSGSTSNIGNNALNWYQKLPGTAPKLLIYSLNQRPSGVPDRFSGSKSGTSASLAISGLQSEDEADYYCEAWDDSLSGPVFGGGTKVTVL

SEQ ID NO: 615 - protein, 117 aa, synthetic construct
QVQLVQSGAEVKKPGSSVKVSCKASGGPFRSYAISWVRQAPGQGLEWMGGIIPIFGTANYAQKFQGRVTITADESTSTAYMELSSLRSEDTAVYYCARGGVYSFDVWGQGTLVTVSS

SEQ ID NO: 616 - protein, 110 aa, synthetic construct
QSGLTQPPSASGTPGQRVTISCSGSGSNVGSNVVNWYQHLPGTAPKLLIYRNNQRPSGVPDRFSGSKSGTSASLAISGLQSEDEADYYCAAWDDRLNGFVFGTGTKVTVL

SEQ ID NO: 617 - protein, 125 aa, synthetic construct
QVQLVQSGAEVKKPGSSVKVSCKASGVPFSSYAISWVRQAPGQGLEWMGGISPLFGTANYAQKFQGRVTITADQSTSTVYMELSSLRSEDTAVYYCARGLGTYSPSLYPRGMDVWGQGTLVTVSS

SEQ ID NO: 618 - protein, 110 aa, synthetic construct
LPVLTQPPSASGTPGQSVTISCSGSSSNIGRNDVNWYQQFPGRAPKLLIYGRDERPFGVPARFSGSKSGTSASLAISGLQSEDEADYYCAAWDASLMIYVFGTGTTVTVL

SEQ ID NO: 619 - protein, 122 aa, synthetic construct
QVQLVQSGAEVKKPGSSVKVSCKASGVTFSSYAISWVRQAPGQGLEWMGGISPMFGTANYAQKFQGRVTITADESTNTVYMELSSLRSEDTAVYYCARGRAYLSVRGSFDVWGQGTLVTVSS

SEQ ID NO: 620 - protein, 110 aa, synthetic construct
SYELTQPPSVSGTPGQRVTISCSGSSSNIGSNTVNWYQQLPGTAPKLLIYSNNQRPSGVPDRFSGSKSGTSASLAISGLQSEDEADYYCAAWDDSLNGYVFGTGTKVTVL

SEQ ID NO: 621 - protein, 117 aa, synthetic construct
QVQLVQSGAEVKKPGSSVKVSCKASGVIFSSYAISWVRQAPGQGLEWMGGIIPIFGTANYAQKFQGRVTITADKSTSTAYMELSSLRSEDTAVYYCARGGSGSFDVWGQGTLVTVSS

SEQ ID NO: 622 - protein, 110 aa, synthetic construct
QPGLTQPPSASGTPGQRVTISCSGSSSNLGSNYVFWYQHLPGAAPKLLIYRNSQRPSGVPDRFSGSKSGTSASLAISGLQSEDEADYYCAAWDDSLNGVVFGGGTKLTVL

SEQ ID NO: 623 - protein, 125 aa, synthetic construct
QVQLVQSGAEVKKPGSSVKVSCKASGVTFSSYAISWVRQAPGQGLEWMGGISPVFGTANYAQKFQGRVTITADDSTNTAYMELSSLRSEDTAVYYCARSRGYTVSSLAGRYFDQWGQGTLVTVSS

SEQ ID NO: 624 - protein, 108 aa, synthetic construct
ETTLTQSPGTLSLSPGERASLSCKASESLCSTCLAWYQQKPGQAPRLIVYGATSRATGIPDRFSGSGSGTDFTLTISRLEPEDFAVYYCQQYGSSPQTFGQGTKVEIK

SEQ ID NO: 625 - protein, 117 aa, synthetic construct
QVQLVQSGAEVKKPGSSVKVSCKASGGTFSSYAISWVRQAPGQGLEWMGGIVPLFGTANYAQKFQGRVTITADESTSTAYMELSSLRSEDTAVYYCARGLGLYFDVWGQGTLVTVSS

SEQ ID NO: 626 - protein, 109 aa, synthetic construct
QTVVTQEPSLTVSPGETVTLTCASSTGAVTSGYYPNWFQQKPGQAPRALIYSTSNKHSWTPARFSGSLLGGKAALTLSGVQPEDEAEYYCLLYYGGPWVFGGGTKLTVL

SEQ ID NO: 627 - protein, 122 aa, synthetic construct
QVQLVQSGAEVKKPGSSVKVSCKASGGTFSSYAISWVRQAPGQGLEWMGGIIPIFGTANYAQKFQGRVTITADESTNTAYMELSSLRSEDTAVYYCARVRGGYGPYGDFDVWGQGTLVTVSS

SEQ ID NO: 628 - protein, 110 aa, synthetic construct
QPGLTQPPSASGTPGQRVTISCSGSSSNIGSHSVNWYRQLPGTAPQLLIYGNSNRPSGVPDRFSGSKSGTSASLAISGLQSEDEADYFCAAWDDGLSGWVFGGGTKLTVL

SEQ ID NO: 629 - protein, 123 aa, synthetic construct
QVQLVQSGAEVKKPGSSVKVSCKASGGPFSSYAISWVRQAPGQGLEWMGGISPIFGTANYAQKFQGRVTITADKSTNTAYMELSSLRSEDTAVYYCARGRSYIVSVSPGFDVWGQGTLVTVSS

SEQ ID NO: 630 - protein, 111 aa, synthetic construct
QSVLTQPPSASGSPGQSVTISCTGTSSDVGGYNYVSWYQQYPGKAPKLMIYEVSKRPSGVPDRFSGSKSGTSASLAISELQSEDEADYYCASWDDSLNAYVFGSGTKVTVL

SEQ ID NO: 631 - protein, 123 aa, synthetic construct
QVQLVQSGAEVKKPGSSVKVSCKASGGIFSSYAISWVRQAPGQGLEWMGGISAIFGTANYAQKFQGRVTITADESTSTAYMELSSLRSEDTAVYYCARDSGIASGYTAYMDYWGQGTLVTVSS

SEQ ID NO: 632 - protein, 108 aa, synthetic construct
SSELTQDPAVSVALGQTVRITCQGDSLRTSYASWYQQKPGQSPVLVIYQSTKRPSGIPERFSASSSGNTASLTITGAQAEDEADYYCNSRGSGGNPYVFGTGTKVTVL

SEQ ID NO: 633 - protein, 117 aa, synthetic construct
QVQLVQSGAEVKKPGSSVKVSCKASGGIFRSYAISWVRQAPGQGLEWMGGIIPMFGTANYAQKFQGRVTITADESTTTVYMELSSLRSEDTAVYYCARGAGSTFDVWGQGTLVTVSS

SEQ ID NO: 634 - protein, 110 aa, synthetic construct
QSVLTQPPSASGTPGQRVTISCSGSSSNIGSNTVNWYQQLPGTAPRLLIYSNNQRPSGVPDRFSGSKSGTSASLAISGLQSEDEADYYCAAWDDSLNGRVFGGGTKLTVL

SEQ ID NO: 635 - protein, 121 aa, synthetic construct
QVQLVQSGAEVKKPGSSVKVSCKASGGTFSSYAISWVRQAPGQGLEWMGGINPIFGTANYAQKFQGRVTITADESTNTAYMELSSLRSEDTAVYYCARGESAYYSRNYDVWGQGTLVTVSS

SEQ ID NO: 636 - protein, 110 aa, synthetic construct
SYELTQPPSVSKGLRQTATLTCTGNSSNVGNQGASWLQQHQGHPPKLLSYRNDNRPSGISERFSASRSGNTASLTITGLQPEDEADYYCSAWDNSLSAWVFGGGTKLTVL

SEQ ID NO: 637 - protein, 123 aa, synthetic construct
QVQLVQSGAEVKKPGSSVKVSCKASGVTFSSYAISWVRQAPGQGLEWMGGISPMFGTANYAQKFQGRVTITADESTNTAYMELSSLRSEDTAVYYCARGGGYYPAGVGRYDVWGQGTLVTVSS

SEQ ID NO: 638 - protein, 113 aa, synthetic construct
DIVMTQSPDSLAVSLGERATINCKSSQNVLYSSNNKNNLAWYQQRPGQPPKVLLYWASTRASGVPDRFSGSGSGTDFTLTINSLQAEDVALYYCQQYYGKPFTFGPGTKVEIK

SEQ ID NO: 639 - protein, 121 aa, synthetic construct
QVQLVQSGAEVKKPGSSVKVSCKASGGTFSSYAISWVRQAPGQGLEWMGGITPLFGTANYAQKFQGRVTITADDSTSTAYMELSSLRSEDTAVYYCARGPTLYSPPVFDVWGQGTLVTVSS

SEQ ID NO: 640 - protein, 110 aa, synthetic construct
QTVVTQEPSFSVSPGGTITLTCGLSSGSVSTTNYPSWYQQTPGRTPRTLIYNTNTRSSGVPDRFSGSILGNKAALTITGAQAGDESDYYCVLYMGRGIYVFGSGTKVSVL

SEQ ID NO: 641 - protein, 123 aa, synthetic construct
QVQLVQSGAEVKKPGSSVKVSCKASGGTFRSYAISWVRQAPGQGLEWMGGIMPIFGTANYAQKFQGRVTITADESTTTVYMELSSLRSEDTAVYYCARGAGVSAGPSWPFDVWGQGTLVTVSS

SEQ ID NO: 642 - protein, 110 aa, synthetic construct
QPGLTQPPSVSKDLRQTATLTCTGNSNNVGKQGATWLQQHQGHPPKLLSYRNNNRPSGISERFSASRSGDTASLTITGLQPEDEADYYCSAWDSSLSVWVFGGGTKLTVL

SEQ ID NO: 643 - protein, 123 aa, synthetic construct
QVQLVQSGAEVKKPGSSVKVSCKASGGTFSSYAISWVRQAPGQGLEWMGGISPMFGTANYAQKFQGRVTITADESTSTVYMELSSLRSEDTAVYYCARSRGYNVAASFGFDVWGQGTLVTVSS

SEQ ID NO: 644 - protein, 107 aa, synthetic construct
EIVLTQSPSFLSASVGDRVTITCRASQYIDRSLHWYQQKPDQSPKLLIKYASQSISGVPSRFSGSGSGTDFSLTINSLETEDAATYYCHQTSSLPWTFGQGTTVEIK

SEQ ID NO: 645 - protein, 121 aa, synthetic construct
QVQLVQSGAEVKKPGSSVKVSCKASGGPFSSYAISWVRQAPGQGLEWMGGIIPIFGTANYAQKFQGRVTITADESTSTAYMELSSLRSEDTAVYYCARGTDYSGYRGFDVWGQGTLVTVSS

SEQ ID NO: 646 - protein, 110 aa, synthetic construct
QTVVTQEPSFSVSPGGTVTLTCALSSGSVSSFNYASWYQQTPGQAPRTLISNTNTRSSGVPDRFSGSILGNKATLTITGAQADDESHYYCALYVGGGISVFGGGTKLTVL

SEQ ID NO: 647 - protein, 116 aa, synthetic construct
QVQLVQSGAEVKKPGSSVKVSCKASGVTFSSYAISWVRQAPGQGLEWMGGITPIFGTANYAQKFQGRVTITADQSTSTAYMELSSLRSEDTAVYYCARGGGVFDVWGQGTLVTVSS

SEQ ID NO: 648 - protein, 110 aa, synthetic construct
SYELTQPPSVSGAPRQRVTISCSGSSSNIGNNAVNWYQQLPGKAPKLLIYYDDMLPSGVSDRFSGSKSGSSASLAISGLQSEDEADYYCAAWDDSLSGPVFGGGTNLTVL

SEQ ID NO: 649 - protein, 122 aa, synthetic construct; identical to SEQ ID NO: 485

SEQ ID NO: 650 - protein, 110 aa, synthetic construct; identical to SEQ ID NO: 486

SEQ ID NO: 651 - protein, 121 aa, synthetic construct; identical to SEQ ID NO: 489

SEQ ID NO: 652 - protein, 111 aa, synthetic construct; identical to SEQ ID NO: 490

SEQ ID NO: 653 - protein, 125 aa, synthetic construct; identical to SEQ ID NO: 497

SEQ ID NO: 654 - protein, 110 aa, synthetic construct; identical to SEQ ID NO: 498

SEQ ID NO: 655 - protein, 123 aa, synthetic construct; identical to SEQ ID NO: 499

SEQ ID NO: 656 - protein, 115 aa, synthetic construct; identical to SEQ ID NO: 500

SEQ ID NO: 657 - protein, 125 aa, synthetic construct; identical to SEQ ID NO: 505

SEQ ID NO: 658 - protein, 110 aa, synthetic construct; identical to SEQ ID NO: 506

SEQ ID NO: 659 - protein, 122 aa, synthetic construct; identical to SEQ ID NO: 523

SEQ ID NO: 660 - protein, 107 aa, synthetic construct; identical to SEQ ID NO: 524

SEQ ID NO: 661 - protein, 9 aa, synthetic construct
  VARIANT 4..5: note = Any naturally occurring amino acid
  VARIANT 8: note = Any naturally occurring amino acid
CARXXGYXP

SEQ ID NO: 662 - protein, 8 aa, synthetic construct
  VARIANT 4..6: note = Any naturally occurring amino acid
CARXXXYY

SEQ ID NO: 663 - DNA, 21 bp, synthetic construct
  source 1..21: mol_type = other DNA
tggacaagggcttgagtggat

SEQ ID NO: 664 - DNA, 22 bp, synthetic construct
  source 1..22: mol_type = other DNA
ccctggaacttctgtgcgtagt

SEQ ID NO: 665 - DNA, 18 bp, synthetic construct
  source 1..18: mol_type = other DNA
cctatccttggtatagca

SEQ ID NO: 666 - DNA, 21 bp, synthetic construct
  source 1..21: mol_type = other DNA
tggacaagggcttgagtggat

SEQ ID NO: 667 - DNA, 22 bp, synthetic construct
  source 1..22: mol_type = other DNA
ccctggaacttctgtgcgtagt

SEQ ID NO: 668 - DNA, 18 bp, synthetic construct
  source 1..18: mol_type = other DNA
ccctatctttggtacagc

SEQ ID NO: 669 - protein, 11 aa, synthetic construct
WGQGTLVTVSS

SEQ ID NO: 670 - protein, 20 aa, synthetic construct
YYYYYGMDVWGQGTTVTVSS

SEQ ID NO: 671 - protein, 14 aa, synthetic construct
FDVWGQGTLVTVSS

SEQ ID NO: 672 - protein, 16 aa, synthetic construct
GGGSGGGSGGGSGGGS

SEQ ID NO: 673 - protein, 8 aa, synthetic construct
IIPIFGTA

SEQ ID NO: 674 - protein, 8 aa, synthetic construct
ISPIFGTA

SEQ ID NO: 675 - protein, 8 aa, synthetic construct
IIPMFGTA

SEQ ID NO: 676 - protein, 8 aa, synthetic construct
IIPIFRTA

SEQ ID NO: 677 - DNA, 354 bp, synthetic construct
  source 1..354: mol_type = other DNA
caggtgcagctggtgcagtctgggggaggcgtggtccaacctgggaggtccctgagactctcctgtgtagcctctgagttcaccttcaatacttatggcatgcactgggtccgccaggctccaggcaagggactggagtgggtggcagctatttcatatgatggaactaagaaattttatgcagactccctgaagggccgattcaccatctccagagacaattccaagaacacgttgtatctccaaatgaacagcctgagatctgaggacacggccgtgtattactgtgcgagaagtggtgactccgatgcttttgatatctggggccaagggacaatggtcaccgtctcctca

SEQ ID NO: 678 - protein, 118 aa, synthetic construct
QVQLVQSGGGVVQPGRSLRLSCVASEFTFNTYGMHWVRQAPGKGLEWVAAISYDGTKKFYADSLKGRFTISRDNSKNTLYLQMNSLRSEDTAVYYCARSGDSDAFDIWGQGTMVTVSS

SEQ ID NO: 679 - DNA, 321 bp, synthetic construct
  source 1..321: mol_type = other DNA
tcctatgagctgactcagccaccctcagtgtccgtgtccccaggacagacagccaccatcacctgctctggagatgaattgggggataaatttgctttctggtatcaacaaaagccaggccagtcccctgtgctggtcatctatcaagatagtaagaggccctcagggatccctgagcgattctctggctccaactctgggaacacagccactctgaccatcagcgggacccaggctctggatgaggctgactattactgtcaggcgtgggacagcaacagttatgtcttcggaactgggaccaaggtcaccgtcctaggt

SEQ ID NO: 680 - protein, 106 aa, synthetic construct
SYELTQPPSVSVSPGQTATITCSGDELGDKFAFWYQQKPGQSPVLVIYQDSKRPSGIPERFSGSNSGNTATLTISGTQALDEADYYCQAWDSNSYVFGTGTKVTVL

SEQ ID NO: 681 - DNA, 360 bp, synthetic construct
  source 1..360: mol_type = other DNA
gaggtgcagctggtgcagtctggggctgaggtgaaggagcctgggtcctcggtgaaggtctcctgcaaggcttctgggggcaccttcggcagttatgctatcaactgggtgcgacaggcccctggacaaaggcttgagtggatgggatggatcgacgctgccaatggtaacacaaaatattcacagaagttccagggcagagtcaccattaccggagacacatccgcgagcacagcctacatggaactgagcagcctgagatctgaagacacggctgtgtattactgtgcgagagataggtggatgactacgcgggcttttgatatctggggccaagggacaatggtcaccgtctcttca

SEQ ID NO: 682 - protein, 120 aa, synthetic construct
EVQLVQSGAEVKEPGSSVKVSCKASGGTFGSYAINWVRQAPGQRLEWMGWIDAANGNTKYSQKFQGRVTITGDTSASTAYMELSSLRSEDTAVYYCARDRWMTTRAFDIWGQGTMVTVSS

SEQ ID NO: 683 - DNA, 333 bp, synthetic construct
  source 1..333: mol_type = other DNA
cagcctgtgctgactcagccaccctcagcgtctgggacccccgggcagagggtcaccatctcttgttctggaagcagctccaacatcggaagtaattatgttttctggtaccagcagctcccagggatggcccccaaactcctcatctctaggaataatcagcggccctcaggggtccctgaccgattctctggctccaagtctggcacctcagcctccctggccatcagtgggccccagtctgaggatgaggctgattattactgtgcagcatgggatgacagcctgcgtggtcccgtgttcggcggagggaccagggtgaccgtcctaggt

SEQ ID NO: 684 - protein, 110 aa, synthetic construct
QPVLTQPPSASGTPGQRVTISCSGSSSNIGSNYVFWYQQLPGMAPKLLISRNNQRPSGVPDRFSGSKSGTSASLAISGPQSEDEADYYCAAWDDSLRGPVFGGGTRVTVL

SEQ ID NO: 685 - DNA, 369 bp, synthetic construct
  source 1..369: mol_type = other DNA
caggtgcagctggtgcagtctggggctgaggtgaagaagcctgggtcctcggtgaaggtctcctgcaaggcgtctggaggcactttcagcagctatgcagtcagctgggtgcgacaggcccctggacaaggtcttgagtgggtgggaaggataatccctatttttggtaaggcaaactacgcacagaagttccagggcagagtcacgataaccgcggacaaatccacgagcacagcctatatggaactgagcagcctgagacctgaagacacggccgtatattactgtgcgagagatcaggggatttcggccaatttcaaagatgcttttgatatctggggccaagggaccacggtcaccgtctcctca

SEQ ID NO: 686 - protein, 123 aa, synthetic construct
QVQLVQSGAEVKKPGSSVKVSCKASGGTFSSYAVSWVRQAPGQGLEWVGRIIPIFGKANYAQKFQGRVTITADKSTSTAYMELSSLRPEDTAVYYCARDQGISANFKDAFDIWGQGTTVTVSS

SEQ ID NO: 687 - DNA, 321 bp, synthetic construct
  source 1..321: mol_type = other DNA
gaaacgacactcacgcagtctccagccaccctgtctgtgtctccaggggaaagagccaccctctcctgcagggccagtgagagtgttggcagcaacttagcctggtaccagcagaaacctggccaggctcccagcctcctcatctatggtgcatccaccagggccactggtatcccagacagattcagtggcagtgggtctgggacagacttcactctcaccatcagcagcctgcagtctgaagattttgcagcttattattgtcagcagtataataactggccactcaccttcggccctgggaccaaagtggaaatcaaa

SEQ ID NO: 688 - protein, 107 aa, synthetic construct
ETTLTQSPATLSVSPGERATLSCRASESVGSNLAWYQQKPGQAPSLLIYGASTRATGIPDRFSGSGSGTDFTLTISSLQSEDFAAYYCQQYNNWPLTFGPGTKVEIK

SEQ ID NO: 689 - DNA, 375 bp, synthetic construct
  source 1..375: mol_type = other DNA
caggtgcagctggtgcagtctggggctgaggtgaagaagcctgggtcctcggtgaaggtctcctgcaaggcttctggaggcaccttcagcagctatgctatcagctgggtgcgacaggcccctggacaagggcttgagtggatgggagggatcatccctatctttggtacagcaaactacgcacagaagttccagggcagagtcacgattaccgcggacaaatccacgagcacagcctacatggagctgagcagcctgagatctgaggacacggccgtgtattactgtgcgagggtaggatattgtagtagtaccagctgtcacatcggcgcttttgatatctggggccaagggaccacggtcaccgtctcctca

SEQ ID NO: 690 - protein, 125 aa, synthetic construct
QVQLVQSGAEVKKPGSSVKVSCKASGGTFSSYAISWVRQAPGQGLEWMGGIIPIFGTANYAQKFQGRVTITADKSTSTAYMELSSLRSEDTAVYYCARVGYCSSTSCHIGAFDIWGQGTTVTVSS

SEQ ID NO: 691 - DNA, 321 bp, synthetic construct
  source 1..321: mol_type = other DNA
gaaacgacactcacgcagtctccaggcaccctgtctttgtctccaggggaaagagccaccctctcctgcagggccagtcagagtgttagcagcagcatagcctggtatcagcagaaacctgggcaggctcccaggctcctcatgtttgattcatccaccagggccactggtatcccagacaggttcagtggcagtgggtctgggacagacttcactctcaacatcagcagcctagagcctgaagattttgcagtgtattactgtcagcagtatagtagctcaccttacacttttggccaggggaccaaactggagatcaaa

SEQ ID NO: 692 - protein, 107 aa, synthetic construct
ETTLTQSPGTLSLSPGERATLSCRASQSVSSSIAWYQQKPGQAPRLLMFDSSTRATGIPDRFSGSGSGTDFTLNISSLEPEDFAVYYCQQYSSSPYTFGQGTKLEIK

SEQ ID NO: 693 - DNA, 375 bp, synthetic construct
  source 1..375: mol_type = other DNA
caggtgcagctggtgcagtctggggctgaggtgaagaagcctgggtcctcggtgaaggtctcctgcaaggcttctggaggcaccttcagcagctatgctatcagctgggtgcgacaggcccctggacaagggcttgagtggatgggagggatcatccctatctttggtacagcaaactacgcacagaagttccagggcagagtcacgattaccgcggacaaatccacgagcacagcctacatggagctgagcagcctgagatctgaggacacggccgtgtattactgtgcgagagcctcatattgtagtactaccagctgcgctagtggtgcttttgatatctggggccaaggcaccctggtcaccgtctcctca

SEQ ID NO: 694 - protein, 125 aa, synthetic construct
QVQLVQSGAEVKKPGSSVKVSCKASGGTFSSYAISWVRQAPGQGLEWMGGIIPIFGTANYAQKFQGRVTITADKSTSTAYMELSSLRSEDTAVYYCARASYCSTTSCASGAFDIWGQGTLVTVSS

SEQ ID NO: 695 - DNA, 339 bp, synthetic construct
  source 1..339: mol_type = other DNA
gacatccagatgacccagtctccagactccctggctgtgtctctgggcgagagggccaccatcaactgcaagtccagccagagtgttttatacagctccaacaataagaactacttagcttggtaccagcagaaaccaggacagcctcctaagctgctcatttactgggcatctgcccgggaatccggggtccctgaccgattcagtggcagcgggtctgggacagatttcactctcaccatcagcagcctgcagcctgaagatgtggcaatttattactgtcagcaatattatagtgttccattcactttcggccctgggaccaaagtggagatcaaa

SEQ ID NO: 696 - protein, 113 aa, synthetic construct
DIQMTQSPDSLAVSLGERATINCKSSQSVLYSSNNKNYLAWYQQKPGQPPKLLIYWASARESGVPDRFSGSGSGTDFTLTISSLQPEDVAIYYCQQYYSVPFTFGPGTKVEIK

SEQ ID NO: 697 - DNA, 363 bp, synthetic construct
  source 1..363: mol_type = other DNA
gaggtgcagctggtgcagtctggagctgaggtgaagaagcctggggcctcagtgaaggtttcctgcaaggcttctggatacaccttcaatgtatatgctatcaactgggtgcgacaggcccctggacaagggcttgagtggatgggaaggatcatccctatccttggtatagcaaactacgcacagaagttccagggcagagtcacgattaccgcggacaaatccacgagcacagcctacatggagctgagcagcctgagatctgaggacacggccgtgtattactgtgcgagagattactatggttcgggagctaggggctttgactactggggccagggcaccctggtcaccgtctcctca

SEQ ID NO: 698 - protein, 121 aa, synthetic construct
EVQLVQSGAEVKKPGASVKVSCKASGYTFNVYAINWVRQAPGQGLEWMGRIIPILGIANYAQKFQGRVTITADKSTSTAYMELSSLRSEDTAVYYCARDYYGSGARGFDYWGQGTLVTVSS

SEQ ID NO: 699 - DNA, 333 bp, synthetic construct
  source 1..333: mol_type = other DNA
cagcctgggctgactcagccaccctcggtgtccaagggcttgagacagaccgccacactcacctgcactgggaacagcaacaatgttggcaaccaaggagcagcttggctgcagcagcaccagggccaccctcccaaactcctatcctacacgaataacaaccggccctcagggatctcagagagattatctgcatccaggtcaggaaacacagcctccctggccattactggactccagcctgaggacgaggcagactattactgtgcatcatgggacagcagcctcagtgtttgggtgatcggcggagggaccaagttgaccgtcctaggt

SEQ ID NO: 700 - protein, 110 aa, synthetic construct
QPGLTQPPSVSKGLRQTATLTCTGNSNNVGNQGAAWLQQHQGHPPKLLSYTNNNRPSGISERLSASRSGNTASLAITGLQPEDEADYYCASWDSSLSVWVIGGGTKLTVL

SEQ ID NO: 701 - DNA, 378 bp, synthetic construct
  source 1..378: mol_type = other DNA
gaggtgcagctggtgcagtctggggctgaggtgaagaagcctgggtcctcggtgaaggtctcctgcaaggcttctggaggcaccttcagcagctatgctatcagctgggtgcgacaggcccctggacaagggcttgagtggatgggagggatcatccctatctttggtatagcaaactacgcacagaagttccagggcagagtcacgattaccgcggacaaatccacgagcacagcctacatggagctgagcagcctgagatctgaggacacggccgtgtattactgtgcgagctctaattactatggttcagggagttattatccgcgaagtgcttttgatatctggggccaagggaccacggtcaccgtctcctca

SEQ ID NO: 702 - protein, 126 aa, synthetic construct
EVQLVQSGAEVKKPGSSVKVSCKASGGTFSSYAISWVRQAPGQGLEWMGGIIPIFGIANYAQKFQGRVTITADKSTSTAYMELSSLRSEDTAVYYCASSNYYGSGSYYPRSAFDIWGQGTTVTVSS

SEQ ID NO: 703 - DNA, 321 bp, synthetic construct
  source 1..321: mol_type = other DNA
gaaacgacactcacgcagtctccagccaccctgtctgtgtctccaggggaaagggccatcctctcctgcagggccagtcagagtataagcaatgacttagcctggtaccagcagaaacctggccaggctcccaggctcctcatctatggtgcatccagcagggccactggcatcccagacaggttcagtggcagtgggtctgggacggacttcaccttcaccatcagcagactggagtctgaagattttgcagtgtattactgtcagcagtatggtgtttcacctctcactttcggcggggggaccaaggtggagatcaaa

SEQ ID NO: 704 - protein, 107 aa, synthetic construct
ETTLTQSPATLSVSPGERAILSCRASQSISNDLAWYQQKPGQAPRLLIYGASSRATGIPDRFSGSGSGTDFTFTISRLESEDFAVYYCQQYGVSPLTFGGGTKVEIK

SEQ ID NO: 705 - protein, 8 aa, synthetic construct
EFTFNTYG

SEQ ID NO: 706 - protein, 8 aa, synthetic construct
ISYDGTKK

SEQ ID NO: 707 - protein, 11 aa, synthetic construct
ARSGDSDAFDI

SEQ ID NO: 708 - protein, 8 aa, synthetic construct
GGTFGSYA

SEQ ID NO: 709 - protein, 8 aa, synthetic construct
IDAANGNT

SEQ ID NO: 710 - protein, 13 aa, synthetic construct
ARDRWMTTRAFDI

SEQ ID NO: 711 - protein, 8 aa, synthetic construct
GGTFSSYA

SEQ ID NO: 712 - protein, 8 aa, synthetic construct
IIPIFGKA

SEQ ID NO: 713 - protein, 16 aa, synthetic construct
ARDQGISANFKDAFDI

SEQ ID NO: 714 - protein, 8 aa, synthetic construct
GGTFSSYA

SEQ ID NO: 715 - protein, 18 aa, synthetic construct
ARVGYCSSTSCHIGAFDI

SEQ ID NO: 716 - protein, 18 aa, synthetic construct
ARASYCSTTSCASGAFDI

SEQ ID NO: 717 - protein, 8 aa, synthetic construct
GYTFNVYA

SEQ ID NO: 718 - protein, 8 aa, synthetic construct
IIPILGIA

SEQ ID NO: 719 - protein, 14 aa, synthetic construct
ARDYYGSGARGFDY

SEQ ID NO: 720 - protein, 8 aa, synthetic construct
IIPIFGIA

SEQ ID NO: 721 - protein, 19 aa, synthetic construct
ASSNYYGSGSYYPRSAFDI

SEQ ID NO: 722 - protein, 6 aa, synthetic construct
ELGDKF

SEQ ID NO: 723 - skipped

SEQ ID NO: 724 - protein, 9 aa, synthetic construct
QAWDSNSYV

SEQ ID NO: 725 - protein, 8 aa, synthetic construct
SSNIGSNY

SEQ ID NO: 726 - skipped

SEQ ID NO: 727 - protein, 11 aa, synthetic construct
AAWDDSLRGPV

SEQ ID NO: 728 - protein, 6 aa, synthetic construct
ESVGSN

SEQ ID NO: 729 - skipped

SEQ ID NO: 730 - protein, 9 aa, synthetic construct
QQYNNWPLT

SEQ ID NO: 731 - protein, 6 aa, synthetic construct
QSVSSS

SEQ ID NO: 732 - skipped

SEQ ID NO: 733 - protein, 9 aa, synthetic construct
QQYSSSPYT

SEQ ID NO: 734 - protein, 1255 aa, Middle East respiratory syndrome coronavirus
MFIFLLFLTLTSGSDLDRCTTFDDVQAPNYTQHTSSMRGVYYPDEIFRSDTLYLTQDLFLPFYSNVTGFHTINHTFGNPVIPFKDGIYFAATEKSNVVRGWVFGSTMNNKSQSVIIINNSTNVVIRACNFELCDNPFFAVSKPMGTQTHTMIFDNAFNCTFEYISDAFSLDVSEKSGNFKHLREFVFKNKDGFLYVYKGYQPIDVVRDLPSGFNTLKPIFKLPLGINITNFRAILTAFSPAQDIWGTSAAAYFVGYLKPTTFMLKYDENGTITDAVDCSQNPLAELKCSVKSFEIDKGIYQTSNFRVVPSGDVVRFPNITNLCPFGEVFNATKFPSVYAWERKKISNCVADYSVLYNSTFFSTFKCYGVSATKLNDLCFSNVYADSFVVKGDDVRQIAPGQTGVIADYNYKLPDDFMGCVLAWNTRNIDATSTGNYNYKYRYLRHGKLRPFERDISNVPFSPDGKPCTPPALNCYWPLNDYGFYTTTGIGYQPYRVVVLSFELLNAPATVCGPKLSTDLIKNQCVNFNFNGLTGTGVLTPSSKRFQPFQQFGRDVSDFTDSVRDPKTSEILDISPCSFGGVSVITPGTNASSEVAVLYQDVNCTDVSTAIHADQLTPAWRIYSTGNNVFQTQAGCLIGAEHVDTSYECDIPIGAGICASYHTVSLLRSTSQKSIVAYTMSLGADSSIAYSNNTIAIPTNFSISITTEVMPVSMAKTSVDCNMYICGDSTECANLLLQYGSFCTQLNRALSGIAAEQDRNTREVFAQVKQMYKTPTLKYFGGFNFSQILPDPLKPTKRSFIEDLLFNKVTLADAGFMKQYGECLGDINARDLICAQKFNGLTVLPPLLTDDMIAAYTAALVSGTATAGWTFGAGAALQIPFAMQMAYRFNGIGVTQNVLYENQKQIANQFNKAISQIQESLTTTSTALGKLQDVVNQNAQALNTLVKQLSSNFGAISSVLNDILSRLDKVEAEVQIDRLITGRLQSLQTYVTQQLIRAAEIRASANLAATKMSECVLGQSKRVDFCGKGYHLMSFPQAAPHGVVFLHVTYVPSQERNFTTAPAICHEGKAYFPREGVFVFNGTSWFITQRNFFSPQIITTDNTFVSGNCDVVIGIINNTVYDPLQPELDSFKEELDKYFKNHTSPDVDLGDISGINASVVNIQKEIDRLNEVAKNLNESLIDLQELGKYEQYIKWPWYVWLGFIAGLIAIVMVTILLCCMTSCCSCLKGACSCGSCCKFDEDDSEPVLKGVKLHYT

SEQ ID NO: 735 - protein, 8 aa, synthetic construct
IIPIFGTA

SEQ ID NO: 736 - protein, 8 aa, synthetic construct
SNNVGNQG

SEQ ID NO: 737 - protein, 12 aa, synthetic construct
QSVLYSSNNKNY

SEQ ID NO: 738 - skipped

SEQ ID NO: 739 - protein, 9 aa, synthetic construct
QQYYSVPFT

SEQ ID NO: 740 - protein, 6 aa, synthetic construct
QSISND

SEQ ID NO: 741 - protein, 9 aa, synthetic construct
QQYGVSPLT

SEQ ID NO: 742 - skipped

SEQ ID NO: 743 - protein, 11 aa, synthetic construct
ASWDSSLSVWV

SEQ ID NO: 744 - protein, 96 aa, Homo sapiens
QVQLVQSGAEVKKPGSSVKVSCKASGGTFSSYAISWVRQAPGQGLEWMGGIIPIFGTANYAQKFQGRVTITADKSTSTAYMELSSLRSEDTAVYYC

SEQ ID NO: 745 - protein, 96 aa, Homo sapiens
QVQLVQSGAEVKKPGSSVKVSCKASGGTFSSYAISWVRQAPGQGLEWMGRIIPILGIANYAQKFQGRVTITADKSTSTAYMELSSLRSEDTAVYYC

SEQ ID NO: 746 - protein, 96 aa, Homo sapiens
QVQLVESGGGVVQPGRSLRLSCAASGFTFSSYGMHWVRQAPGKGLEWVAVISYDGSNKYYADSVKGRFTISRDNSKNTLYLQMNSLRAEDTAVYYC

SEQ ID NO: 747 - protein, 96 aa, Homo sapiens
QVQLVQSGAEVKKPGASVKVSCKASGYTFTSYAMHWVRQAPGQRLEWMGWINAGNGNTKYSQKFQGRVTITRDTSASTAYMELSSLRSEDTAVYYC

SEQ ID NO: 748 - protein, 87 aa, Homo sapiens
SYELTQPPSVSVSPGQTASITCSGDKLGDKYACWYQQKPGQSPVLVIYQDSKRPSGIPERFSGSNSGNTATLTISGTQAMDEADYYC

SEQ ID NO: 749 - protein, 89 aa, Homo sapiens
QSVLTQPPSASGTPGQRVTISCSGSSSNIGSNYVYWYQQLPGTAPKLLIYRNNQRPSGVPDRFSGSKSGTSASLAISGLRSEDEADYYC

SEQ ID NO: 750 - protein, 88 aa, Homo sapiens
EIVMTQSPATLSVSPGERATLSCRASQSVSSNLAWYQQKPGQAPRLLIYGASTRATGIPARFSGSGSGTEFTLTISSLQSEDFAVYYC

SEQ ID NO: 751 - protein, 94 aa, Homo sapiens
DIVMTQSPDSLAVSLGERATINCKSSQSVLYSSNNKNYLAWYQQKPGQPPKLLIYWASTRESGVPDRFSGSGSGTDFTLTISSLQAEDVAVYYC

SEQ ID NO: 752 - protein, 89 aa, Homo sapiens
EIVLTQSPGTLSLSPGERATLSCRASQSVSSSYLAWYQQKPGQAPRLLIYGASSRATGIPDRFSGSGSGTDFTLTISRLEPEDFAVYYC

SEQ ID NO: 753 - protein, 89 aa, Homo sapiens
QAGLTQPPSVSKGLRQTATLTCTGNSNNVGNQGAAWLQQHQGHPPKLLSYRNNNRPSGISERLSASRSGNTASLTITGLQPEDEADYYC

SEQ ID NO: 754 - protein, 12 aa, Middle East respiratory syndrome coronavirus
AAALDTVYRPNI

SEQ ID NO: 755 - protein, 12 aa, Middle East respiratory syndrome coronavirus
PAVLDTVYRPNI

SEQ ID NO: 756 - protein, 12 aa, Middle East respiratory syndrome coronavirus
ASALDTVYRPNI

SEQ ID NO: 757 - protein, 12 aa, Middle East respiratory syndrome coronavirus
AVALDTVYRPNI

SEQ ID NO: 758 - protein, 12 aa, Middle East respiratory syndrome coronavirus
AAAFDTVYRPNI

SEQ ID NO: 759 - protein, 12 aa, Middle East respiratory syndrome coronavirus
AAALGTVYRPNI

SEQ ID NO: 760 - protein, 12 aa, Middle East respiratory syndrome coronavirus
AAALDTAYRPNI

SEQ ID NO: 761 - protein, 12 aa, Middle East respiratory syndrome coronavirus
AAALDTVYRPII

SEQ ID NO: 762 - protein, 12 aa, Middle East respiratory syndrome coronavirus
AAALDTVYRSNI

SEQ ID NO: 763 - protein, 12 aa, Middle East respiratory syndrome coronavirus
AAALDTVYGPNI

SEQ ID NO: 764 - protein, 12 aa, synthetic construct
AAALDTVYSPNT

SEQ ID NO: 765 - protein, 12 aa, Middle East respiratory syndrome coronavirus
AAALDTVYTPNI

SEQ ID NO: 766 - protein, 12 aa, Middle East respiratory syndrome coronavirus
AAALDTVYKPNI

SEQ ID NO: 767 - protein, 12 aa, Middle East respiratory syndrome coronavirus
AAAFDAVYRPNI

SEQ ID NO: 768 - protein, 12 aa, Middle East respiratory syndrome coronavirus
AAALDTVYKPNI

SEQ ID NO: 769 - protein, 12 aa, Middle East respiratory syndrome coronavirus
AAAFDTVCRPNI

SEQ ID NO: 770 - protein, 12 aa, Middle East respiratory syndrome coronavirus
AAALDTVHRPNI

SEQ ID NO: 771 - protein, 112 aa, Homo sapiens
QVQLVQSGGGVVQPGRSLRLSCAASGFTFSSYGMHWVRQAPGKGLEWVAVISYDGSKYYADSVKGRFTISRDNSKNTLYLQMNSLRAEDTAVYYCARDGDVWGQGTTVTVSS

SEQ ID NO: 772 - protein, 121 aa, Homo sapiens
EVQLVESGGGVVQPGRSLRLSCAASGFTFSSYGMHWVRQAPGKGLEWVAVISYDGSNKYYADSVKGRFTISRDNSKNTLYLQVSSLRAEDTAVYYCVRDLVAAAGTAFDIWGQGTTVTVSS

SEQ ID NO: 773 - protein, 120 aa, Homo sapiens
QVQLQQSGPGLVKPSQTLSLTCAVSGDSVSSNFVAWNWIRQSPSRGLEWLGRTYYRSRWYNDYAVSVQSRIRVTPDTSKNQFSLHLDSVTPEDTAVYYCARGQHSGFDFWGQGTLVTVSS

SEQ ID NO: 774 - protein, 126 aa, Homo sapiens
QVQLVQSGAEVKKPGASVKVSCKASGYTFTSYGISWVRQAPGQGLEWMGWISAYNGNTNYAQKLQGRVTMTTDTSTSTAYMELRSLRSDDTAVYYCARDTPGIAARRYYYYGMDVWGQGTTVTVSS

SEQ ID NO: 775 - protein, 121 aa, Homo sapiens
QVQLVQSGGGVVQPGRSLRLSCAASGFTFSSYPMHWVRQAPGKGLEWMTVISSDGRNKYYPDSVKGRFTISRDNSKNTLYLQMNSLRPEDTAVYYCARGGYHDFWSGPDYWGQGTLVTVSS

SEQ ID NO: 776 - protein, 127 aa, Homo sapiens
EVQLVQSGGGLVQPGGSLRLSCAASGFTFSSYAMSWVRQAPGKGLEWVANIKQDGSEKYYVDSVKGRFTISRDNAKNSLYLQMNSLRAEDTAVYYCARDQVSGITIFGGKWRSPDVWGQGTTVTVSS

SEQ ID NO: 777 - protein, 126 aa, Homo sapiens
QVTLKESGGGVVQPGRSLRLSCAASGFTFTNYGLHWVRQAPGKGLEWVAVISHDGTKKYYADSVKGRFTISRDSSENTLYLQMNSLRPEDSALYYCARDGGYCSGGRCYSYGMDVWGQGTTVTVSS

SEQ ID NO: 778 - protein, 122 aa, Homo sapiens
QVQLVQSGGGVVLPGRSLRLSCVASGFTFRRYGMHWVRQAPGKGLEWVSLISYDGSKTFYGESVKGRFTISRDNSKNTLYLQMNSLRAEDTAVYYCARATVTTDGYYYMDVWGKGTTVTVSS

SEQ ID NO: 779 - protein, 89 aa, Homo sapiens
QSVLTQPPSVSPGQTVTISCGSGVSWYQQPGAPKLLIYNRPSGIPDRFSGSKSGNTASLTITGLQAEDAEEYYCSWDVFGGGTKLTVLG

SEQ ID NO: 780 - protein, 111 aa, Homo sapiens
QPVLTQPRSVSGSPGQSVTISCTGTISDVGGHNFVSWYQQNPGKAPKLIIFEVTKRPAGVPDRFSGSKSGNTASLTVSGLQAEDEGEYYCSSYGGSNDVIFGGGTKLSVLG

SEQ ID NO: 781 - protein, 111 aa, Homo sapiens
QSVLTQPPSVSKGLRQTATLTCTGNSNNVGNQGAAWLQQHQGHPPKLLSYRNNNRPSGISERFSASRSGNTASLTITGLQPEDEADYYCSAWDNRLKTYVFGTGGKVTVLG

SEQ ID NO: 782 - protein, 109 aa, Homo sapiens
SSELTQDPAVSVALGQTVRITCQGDSLRKFFASWYQQKPGQAPVLVIYGKNSRPSGIPDRFSGSNSRNTASLTITGAQAEDEGDYYCNSRDSRDNHQVFGAGTKVTVLS

SEQ ID NO: 783 - protein, 108 aa, Homo sapiens
EIVLTQSPATLSVSPGERATLSCRASQSVNTNLAWYQQKPGQAPRLLIYGASSRATGIPDRFSGSGSGTDFTLTISRLEPEDFAVYYCQHYGSSPLTFGGGTKLEIKR

SEQ ID NO: 784 - protein, 107 aa, Homo sapiens
SSELTQDPAVSVALGQTVRITCQGDSLRSYYASWYQQKPGQAPVLVIYGKNNRPSGIPDRFSGSKSHNTAYLTITGAQAEDEADYFCNSRSGSQRVFGGGTKLTVLG

SEQ ID NO: 785 - protein, 111 aa, Homo sapiens
QSVLTQPPSASGTPGQRVTISCSGSRSNIGSNTVNWYQQLPGTAPKLLIYTNNQRPSGVPDRFSGSKSGTSASLAITGLQAEDEADYYCLSFDSSLTSYVFGTGTKVTVLG

SEQ ID NO: 786 - protein, 112 aa, Homo sapiens
QSVLTQPPSASGTPGQRVTISCSGSRSNIGGNTVNWYQQLPGTAPKLLIYANNQRPSGVPDRFSGSKSGTSASLAISGLRSEDEADYYCAAWDDNLSGHVVFGGGTKLTVLR

SEQ ID NO: 787 - protein, 5 aa, Homo sapiens
SYGMH

SEQ ID NO: 788 - protein, 17 aa, Homo sapiens
VISYDGSNKYYADSVKG

SEQ ID NO: 789 - protein, 12 aa, Homo sapiens
DLVAAAGTAFDI

SEQ ID NO: 790 - protein, 14 aa, Homo sapiens
TGTISDVGGHNFVS

SEQ ID NO: 791 - protein, 7 aa, Homo sapiens
EVTKRPA

SEQ ID NO: 792 - protein, 10 aa, Homo sapiens
SSYGGSNDVI

SEQ ID NO: 793 - protein, 7 aa, Homo sapiens
SNFVAWN

SEQ ID NO: 794 - protein, 18 aa, Homo sapiens
RTYYRSRWYNDYAVSVQS

SEQ ID NO: 795 - protein, 8 aa, Homo sapiens
GQHSGFDF

SEQ ID NO: 796 - protein, 13 aa, Homo sapiens
TGNSNNVGNQGAA

SEQ ID NO: 797 - protein, 7 aa, Homo sapiens
RNNNRPS

SEQ ID NO: 798 - protein, 11 aa, Homo sapiens
SAWDNRLKTYV

SEQ ID NO: 799 - protein, 5 aa, Homo sapiens
SYGIS

SEQ ID NO: 800 - protein, 17 aa, Homo sapiens
WISAYNGNTNYAQKLQG

SEQ ID NO: 801 - protein, 17 aa, Homo sapiens
DTPGIAARRYYYYGMDV

SEQ ID NO: 802 - protein, 11 aa, Homo sapiens
QGDSLRKFFAS

SEQ ID NO: 803 - protein, 7 aa, Homo sapiens
GKNSRPS

SEQ ID NO: 804 - protein, 11 aa, Homo sapiens
NSRDSRDNHQV

SEQ ID NO: 805 - protein, 5 aa, Homo sapiens
SYPMH

SEQ ID NO: 806 - protein, 17 aa, Homo sapiens
VISSDGRNKYYPDSVKG

SEQ ID NO: 807 - protein, 12 aa, Homo sapiens
GGYHDFWSGPDY

SEQ ID NO: 808 - protein, 11 aa, Homo sapiens
RASQSVNTNLA

SEQ ID NO: 809 - protein, 7 aa, Homo sapiens
GASSRAT

SEQ ID NO: 810 - protein, 9 aa, Homo sapiens
QHYGSSPLT

SEQ ID NO: 811 - protein, 5 aa, Homo sapiens
SYAMS

SEQ ID NO: 812 - protein, 17 aa, Homo sapiens
NIKQDGSEKYYVDSVKG

SEQ ID NO: 813 - protein, 18 aa, Homo sapiens
DQVSGITIFGGKWRSPDV

SEQ ID NO: 814 - protein, 11 aa, Homo sapiens
QGDSLRSYYAS

SEQ ID NO: 815 - protein, 7 aa, Homo sapiens
GKNNRPS

SEQ ID NO: 816 - protein, 9 aa, Homo sapiens
NSRSGSQRV

SEQ ID NO: 817 - protein, 5 aa, Homo sapiens
NYGLH

SEQ ID NO: 818 - protein, 17 aa, Homo sapiens
VISHDGTKKYYADSVKG

SEQ ID NO: 819 - protein, 17 aa, Homo sapiens
DGGYCSGGRCYSYGMDV

SEQ ID NO: 820 - protein, 13 aa, Homo sapiens
SGSRSNIGSNTVN

SEQ ID NO: 821 - protein, 7 aa, Homo sapiens
TNNQRPS

SEQ ID NO: 822 - protein, 11 aa, Homo sapiens
LSFDSSLTSYV

SEQ ID NO: 823 - protein, 5 aa, Homo sapiens
RYGMH

SEQ ID NO: 824 - protein, 17 aa, Homo sapiens
LISYDGSKTFYGESVKG

SEQ ID NO: 825 - protein, 13 aa, Homo sapiens
ATVTTDGYYYMDV

SEQ ID NO: 826 - protein, 13 aa, Homo sapiens
SGSRSNIGGNTVN

SEQ ID NO: 827 - protein, 7 aa, Homo sapiens
ANNQRPS

SEQ ID NO: 828 - protein, 12 aa, Homo sapiens
AAWDDNLSGHVV

SEQ ID NO: 829 - skipped

SEQ ID NO: 830 - protein, 38 aa, Homo sapiens
MEGISIYTSDNYTEEMGSGDYDSMKEPCFREENANFNK

SEQ ID NO: 831 - protein, 38 aa, Macaca mulatta
MEGISIYTSDNYTEEMGSGDYDSIKEPCFREENANFNR

SEQ ID NO: 832 - protein, 38 aa, Mus musculus
MEPISIYTSDNYSEEVGSGDYDSNKEPCFDEENVHFNR

SEQ ID NO: 833 - protein, 14 aa, Homo sapiens
DAVANWYFGNFLCK

SEQ ID NO: 834 - protein, 14 aa, Macaca mulatta
DAVANWYFGNFLCK

SEQ ID NO: 835 - protein, 14 aa, Mus musculus
DAMADWYFKNFLCK

SEQ ID NO: 836 - protein, 27 aa, Homo sapiens
NVSEADDRYICDRFYPNDLWVVVFQFQ

SEQ ID NO: 837 - protein, 27 aa, Macaca mulatta
SVSEADDRYICDRFYPNDLWVVVFQFQ

SEQ ID NO: 838 - protein, 30 aa, Mus musculus
DVSQGDIAQGRYICDRLYPDSLWMVVFQFQ

SEQ ID NO: 839 - protein, 21 aa, Homo sapiens
DSFILLEIIKQGCEFENTVHK

SEQ ID NO: 840 - protein, 21 aa, Macaca mulatta
DSFILLEIIKQGCEFENTVHK

SEQ ID NO: 841 - protein, 21 aa, Mus musculus
DSFILLGVIKQGCDFESIVHK

SEQ ID NO: 842 - protein, 365 aa, Homo sapiens
MEGISIYTSDNYTEEMGSGDYDSMKEPCFREENANFNKIFLPTIYSIIFLTGIVGNGLVILVMGYQKKLRSMTDKYRLHLSVADLLFVITLPFWAVDAVANWYFGNFLCKAVHVIYTVNLYSSVLILAFISLDRYLAIVHATNSQRPRKLLAEKVVYVGVWIPALLLTIPDFIFANVSEADDRYICDRFYPNDLWVVVFQFQHIMVGLILPGIVILSCYCIIISKLSHSKGHQKRKALKTTVILILAFFACWLPYYIGISIDSFILLEIIKQGCEFENTVHKWISITEALAFFHCCLNPILYAFLGAKFKTSAQHALTSVSRGSSLKILSKGKRGGHSSVSTESESSSFHSSGTETSQVAPALES

SEQ ID NO: 843 - protein, 341 aa, Homo sapiens
MEPCFREENANFNKIFLPTIYSIIFLTGIVGNGLVILVMGYQKKLRSMTDKYRLHLSVADLLFVITLPFWAVDAVANWYFGNFLCKAVHVIYTVNLYSSVLILAFISLDRYLAIVHATNSQRPRKLLAEKVVYVGVWIPALLLTIPDFIFANVSEADDRYICDRFYPNDLWVVVFQFQHIMVGLILPGIVILSCYCIIISKLSHSKGHQKRKALKTTVILILAFFACWLPYYIGISIDSFILLEIIKQGCEFENTVHKWISITEALAFFHCCLNPILYAFLGAKFKTSAQHALTSVSRGSSLKILSKGKRGGHSSVSTESESSSFHSSGTETSQVAPALES

SEQ ID NO: 844 - protein, 334 aa, Homo sapiens
ENANFNKIFLPTIYSIIFLTGIVGNGLVILVMGYQKKLRSMTDKYRLHLSVADLLFVITLPFWAVDAVANWYFGNFLCKAVHVIYTVNLYSSVLILAFISLDRYLAIVHATNSQRPRKLLAEKVVYVGVWIPALLLTIPDFIFANVSEADDRYICDRFYPNDLWVVVFQFQHIMVGLILPGIVILSCYCIIISKLSHSKGHQKRKALKTTVILILAFFACWLPYYIGISIDSFILLEIIKQGCEFENTVHKWISITEALAFFHCCLNPILYAFLGAKFKTSAQHALTSVSRGSSLKILSKGKRGGHSSVSTESESSSFHSSGTETSQVAPALES

SEQ ID NO: 845 - protein, 121 aa, Homo sapiens
QVQLVQSGGGLVQPGGSLRLSCAASGFTFSSYAMSWVRQAPGKGLEWVSAISGSGGSTYYADSVKGRFTISRDNSKNTLYLQMNSLRAEDTAVYYCARNGNYRGSLAFDIWGQGTLVTVSS

SEQ ID NO: 846 - protein, 113 aa, Homo sapiens
QSVLTQPPSVSGAPGQRVTISCTGSSSNIGAGYDVHWYQQLPGTAPKLLIYGNNNRPSGVPDRFSGSKSGTSASLAITGLQAEDEADYYCQSYDSSLSAWVVFGGGTKLTVLG

SEQ ID NO: 847 - protein, 119 aa, Homo sapiens
EVQLVQSGGGVVQPGGSLRLSCAASGFPFSSYAMSWVRQAPGKGLEWVSAISANGGTTYYADSVKGRFTISRDNSKNTLYLQMNSLRAEDTAVYYCANNGNYRGAFDIWGQGTMVTVSS

SEQ ID NO: 848 - protein, 119 aa, Homo sapiens
QVQLVQSGGGLVQPGGSLRLSCAASGFPFSSYAMSWVRQAPGKGLEWVSAISANGGTTYYADSVKGRFTISRDNSKNTLYLQMNSLRAEDTAVYYCANNGNYRGAFDIWGQGTMVTVSS

SEQ ID NO: 849 - protein, 119 aa, Homo sapiens; identical to SEQ ID NO: 848

SEQ ID NO: 850 - protein, 119 aa, Homo sapiens
QVQLVQSGGGLVQPGGSLRLSCAASEFTFGTYAMTWVRQAPGKGLEWVSAVSGSGGSTYYADSVKGRFTISRDNSRNTLYLQMNSLRADDTAVYYCARGPVLRYGFDIWGQGTMVTVSS

SEQ ID NO: 851 - protein, 119 aa, Homo sapiens
QVQLVQSGGGVVQPGGSLRLSCAASGFPFSSYAMSWVRQAPGKGLEWVSAISANGGTTYYADSVKGRFTISRDNSKNTLYLQMNSLRAEDTAVYYCANNGNYRGAFDIWGQGTMVTVSS

SEQ ID NO: 852 - protein, 118 aa, Homo sapiens
QVQLQESGGGLVQPGGSLRLSCAASGFTFSIYAMSWVRQAPGKGLEWVSAISGSGGGTYHADSVKGRFTISRDNSKNTLYLQMNSLRAEDTAVYYCAKFSAYSGYDLWGQGTLVTVSS

SEQ ID NO: 853 - protein, 119 aa, Homo sapiens
QVQLVQSGGGLVRPGGSLRLSCAASGFPFSSYAMSWVRQAPGKGLEWVSAISANGGTTYYADSVKGRFTISRDNSKNTLYLQMNSLRAEDTAVYYCANNGNYRGAFDIWGQGTTVTVSS

SEQ ID NO: 854 - protein, 119 aa, Homo sapiens; identical to SEQ ID NO: 848

SEQ ID NO: 855 - protein, 119 aa, Homo sapiens
EVQLVQSGGGLVQPGGSLRLSCAASGFTFSSYAMSWVRQAPGKGLEWVSAISANGGTTYYADSVKGRFTISRDNSKNTLYLQMNSLRAEDTAVYYCANNGNYRGAFDIWGQGTTVTVSS

SEQ ID NO: 856 - protein, 116 aa, Homo sapiens
QVQLVQSGGGLVQPGGSLRLSCAASGFTFSSYAMSWVRQAPGKGLEWVSAISGSGGSTYYADSVKGRFTISRDNSKNTLYLQMNSLRAEDTAVYYCARAAAGFDYWGQGTLVTVSS

SEQ ID NO: 857 - protein, 119 aa, Homo sapiens
QVQLQESGGGLVQPGGSLRLSCAASGFTFSSYAMSWVRQAPGKGLEWVSAISGSGGSTYYADSVKGRFTISRDNSKNTLYLQMNSLRAEDTAVYYCAKIGRYSSSLGYWGQGTLVTVSS

SEQ ID NO: 858 - protein, 122 aa, Homo sapiens
QVQLVQSGGGVVQPGRSLRLSCAASGFTFSSYGMHWVRQAPGKGLEWVAVISYDGSNKYYADSVKGRFTISRDNSKNTLYLQMNSLRAEDTAVYYCAREAPYSSSLDAFDIWGQGTMVTVSS

SEQ ID NO: 859 - protein, 118 aa, Homo sapiens
QVQLQESGGGLVQPGGSLRLSCAASGFTFSSYAMSWVRQAPGKGLEWVSAISGSGGSTYYADSVKGRFTISRDNSKNTLYLQMNSLRAEDTAVYYCARSHSSGGFDYWGQGTLVTVSS

SEQ ID NO: 860 - protein, 118 aa, Homo sapiens; identical to SEQ ID NO: 859

SEQ ID NO: 861 - protein, 116 aa, Homo sapiens
QVTLKESGGGVVQPGTSLRLSCAASGFTFSNYAMTWVRQAPGKGLEWVGLISYDGSVTHYTDSVKGRFTISRDNAKNSLYLQMNTLRADDTAVYYCARGSGYQEHWGQGTLVTVSS

SEQ ID NO: 862 - protein, 118 aa, Homo sapiens
QVQLVQSGGGLVQPGGSLRLSCAASGFTFSSYAMSWVRQAPGKGLEWVSAISGSGGSTYYADSVKGRFTISRDNSKNTLYLQMNSLRAEDTAVYYCATYGDYGSLDYWGQGTLVTVSS

SEQ ID NO: 863 - protein, 122 aa, Homo sapiens
QVQLVQSGGGLVQPGGSLRLSCAASGFTFSSYAMSWVRQAPGKGLEWVSAISGSGVSTYYADSVKGRFTISRDNSKNTLYLQMNSLRAEDTAVYYCAKYCSSTSCYRGMDVWGKGTLVTVSS

SEQ ID NO: 864 - protein, 119 aa, Homo sapiens
QVQLVQSGGGVVQPGRSLRLSCAASGFTFSSYGMHWVRQAPGKGLEWVAVISYDGSNKYYADSVKGRFTISRDNSKNTLYLQMNSLRAEDTAVYYCARGRAARPPFDYWGQGTLVTVSS

SEQ ID NO: 865 - protein, 119 aa, Homo sapiens; identical to SEQ ID NO: 851

SEQ ID NO: 866 - protein, 121 aa, Homo sapiens
QVQLVQSGGGLVQPGGSLRLSCAAPEFTFSKYAMSWVRQAPGKGLEWVSGISGSGGSTYYADSVKGRFTISRDNSKNTLYLQMNSLRAEDTAVYYCAKSSRSGYFLPLDYWGQGTLVTVSS

SEQ ID NO: 867 - protein, 118 aa, Homo sapiens
EVQLVESGGGVVQPGRSLRLSCAASGFTFSSYGMHWVRQAPGKGLEWVSAISGSGGSTYYADSVKGRFTISRDNAKNTLYLQMNSLRAEDTAVYYCARAAVTGGFDPWGQGTLVTVSS

SEQ ID NO: 868 - protein, 112 aa, Homo sapiens
QSVLTQPPSVSGAPGQRVTISCTGSSSNIGAGFDVHWYQQLPGTAPKLLIYGNTNRPSGVPDRFSGSKSGTSASLAITGLQAEDETDYYCQSYDSRLSAWVFGGGTKLTVLG

SEQ ID NO: 869 - protein, 111 aa, Homo sapiens
QSVLTQPPSVSGAPGQRVTISCTGSSSNIGAGYDVHWYQQLPGTAPKLLIYGNSNRPSGVPDRFSGSKSGSSASLAITGLQAEDEAHYYCQSYDRSLSWVFGGGTKLTVLG

SEQ ID NO: 870 - protein, 112 aa, Homo sapiens
QSVLTQPPSVSGAPGQRVTISCTGSSSNIGAGYDVHWYQQLPGTAPKLLIYGNTNRPSGVPDRFSGSKSGTSASLAIIGLQADDEADYYCQSYDSTLRVWMFGGGTKLTVLG

SEQ ID NO: 871 - protein, 112 aa, Homo sapiens
QSVLTQPPSVSGAPGQRITISCTGSRSNIGADYDVHWYQQLPGTAPKLLIYANNNRPSGVPGRFSASKSGTSASLAISGLQAEDEADYYCQSYDSSLRAWVFGGGTKLAVLG

SEQ ID NO: 872 - protein, 112 aa, Homo sapiens
QSVLTQPPSVSGAPGQRITISCTGSRSNIGADYDVHWYQQLPGTAPKLLIYANNNRPSGVPDRFSGSKSGTSASLAITGLQAEDETDYFCQSYDSSLSAWVFGGGTKVTVLG

SEQ ID NO: 873 - protein, 111 aa, Homo sapiens
QSVLTQPPSVSGAPGQRVTISCTGSSSNIGRGYNVHWYQQLPGTAPKLLIYDNTNRPSGVPARFSGSKSATSASLTITGLQADDEADYYCQSYDSGLRWVFGGGTKLTLLG

SEQ ID NO: 874 - protein, 111 aa, Homo sapiens
QSVLTQPPSVSGAPGQRITISCTGSSSNIGAGYDVHWYQQVPGKAPKVVIYGNNNRPSGVPDRFSGSKSGASASLAITGLQTEDEADYYCQSYDKSLTWVFGGGTKVTVLG

SEQ ID NO: 875 - protein, 111 aa, Homo sapiens
QSVLTQPPSVSGAPGQRITISCTGTSSNIGAGYDVHWYQQLPGAAPRVLIYGNNNRPSGVPDRFSGSKSGTSASLAITGLQSEDEADYYCQSYDKSLSWVFGGGTKLTVLR

SEQ ID NO: 876 - protein, 112 aa, Homo sapiens
QSVLTQPPSVSGAPGQRVTISCTGSSSNIGAGFDVHWYQQLPGTAPRLLIYGNNNRPSGVPDRFSGSKSGTSASLAITGLQAEDETDYFCQSYDSSLSAWVFGGGTKVTVLR

SEQ ID NO: 877 - protein, 112 aa, Homo sapiens
QSVLTQPPSVSGAPGQRVTISCTGSSSNIGRGYNVHWYQQLPGTAPKLLIYDDTNRPSGVPHRFSGSKSGTSASLAITGLQAEDEADYYCQSYDSSLRAWVFGGGTKLAVLG

SEQ ID NO: 878 - protein, 111 aa, Homo sapiens
QSVLTQPPSVSGAPGQRVTISCTGSSSNIGRGYNVHWYQQLPGTAPKLLIYDNTNRPSGVPARFSGSKSATSASLAITGLQADDEADYYCQSYDSGLRWVFGGGTKLTLLR

SEQ ID NO: 879 - protein, 111 aa, Homo sapiens
QSVLTQPPSVSGAPGQRVTISCTGSSSNIGRGYNVHWYQQLPGTAPKLLIYGNSNRPSGVPDRFSGSSSGNTASLTITGAQAEDEADYYCHSRDNNGHHIFGGGTKLTVLS

SEQ ID NO: 880 - protein, 112 aa, Homo sapiens
QSVLTQPPSVSGAPGQRVTISCTGSSSNIGRGYNVHWYQQLPGTAPKLLIYGNTNRPSGVPDRFSGSKSGTSASLAITGLQAEDEGDYYCQSYDSSLSAWVFGGGTKLTVLG

SEQ ID NO: 881 - protein, 112 aa, Homo sapiens
  VARIANT 83: note = Any naturally occurring amino acid
QSVLTQPPSVSGAPGQRVTISCTGSSSNIGRGYNVHWYQQLPGTAPKLLIYGNTNRPSGVPDRFSGSKSGTSASLAITGLQAXDEGDYYCQSYDSSLSAWVFGGGTKLTVLG

SEQ ID NO: 882 - protein, 110 aa, Homo sapiens
LPVLTQPPSVSVAPGQTARITCGGNNIGSKSVHWYQQKPGQAPVLVIYYDSDRPSGIPERFSGSNSGNTATLTISRVEAGDEADYYCQVWDSSSDHHVVFGGGTKLTVLG

SEQ ID NO: 883 - protein, 112 aa, Homo sapiens
QSVLTQPPSVSGAPGQRVTISCTGSSSNIGAGYDVHWYQQLPGTAPKLLIYANNNRPSGVPDRFSGSKSGTSASLAITGLQAEDEADYYCQSYDSSLRAWVFGGGTKLAVLG

SEQ ID NO: 884 - protein, 112 aa, Homo sapiens; identical to SEQ ID NO: 883

SEQ ID NO: 885 - protein, 111 aa, Homo sapiens
QPVLTQPPSASGTPGQRVTISCSGSSSNIGSNYVYWYQQLPGTAPKLPIYRNNQRPSGVPDRFSGSKSGTSASLAISGLRSEDEADYYCAAWDDSLNGVVFGGGTKLTVLR

SEQ ID NO: 886 - protein, 112 aa, Homo sapiens
QSVLTQPPSVSGAPGQRVTISCTGSSSNIGAGYDVHWYQHLPGTAPKLLIYGNSNRPSGVPDRFSGSKSGTSASLAITGLQAEDETDYFCQSYDSSLSAWVFGGGTKVTVLG

SEQ ID NO: 887 - protein, 109 aa, Homo sapiens
SSELTQDPAVSVALGQTVRITCQGNSLRYYYPSWYQQKPGQAPVLVIYGKNNRPSGIPDRFSGSSSGNTASLTITGTQAEDEADYYCSSRDNTDNRVVFGGGTKLTVLG

SEQ ID NO: 888 - protein, 109 aa, Homo sapiens
QPGLTQPPSVSVAPGQTARITCGGDNIGRKSVHWYQQRPGQAPILVIRDDRDRPSGIPERFSGSSSVNTATLIISRVEAGDEADYYCQVWDSSSKHYVFGPGTKVTALG

SEQ ID NO: 889 - protein, 458 aa, Homo sapiens
MAPLCPSPWLPLLIPAPAPGLTVQLLLSLLLLMPVHPQRLPRMQEDSPLGGGSSGEDDPLGEEDLPSEEDSPREEDPPGEEDLPGEEDLPGEEDLPEVKPKSEEEGSLKLEDLPTVEAPGDPQEPQNNAHRDKEGDDQSHWRYGGDPPWPRVSPACAGRFQSPVDIRPQLAAFCPALRPLELLGFQLPPLPELRLRNNGHSVQLTLPPGLEMALGPGREYALQLHLHWGAAGRPGSEHTVEGHRFPAEIHVVHLSTAFARVDEALGRPGGLAVLAAFLEEGPEENSAYEQLLSRLEEIAEEGSETQVPGLDISALLPSDFSRYFQYEGSLTTPPCAQGVIWTVFNQTVMLSAKQLHTLSDTLWGPGDSRLQLNFRATQPLNGRVIEASFPAGVDSSPRAAEPVQLNSCLAAGDILALVFGLLFAVTSVAFLVQMRRQHRRGTKGGVSYRPAEVAETGA

SEQ ID NO: 890 - protein, 437 aa, Mus musculus
MASLGPSPWAPLSTPAPTAQLLLFLLLQVSAQPQGLSGMQGEPSLGDSSSGEDELGVDVLPSEEDAPEEADPPDGEDPPEVNSEDRMEESLGLEDLSTPEAPEHSQGSHGDEKGGGHSHWSYGGTLLWPQVSPACAGRFQSPVDIRLERTAFCRTLQPLELLGYELQPLPELSLSNNGHTVQLTLPPGLKMALGPGQEYRALQLHLHWGTSDHPGSEHTVNGHRFPAEIHVVHLSTAFSELHEALGRPGGLAVLAAFLQESPEENSAYEQLLSHLEEISEEGSKIEIPGLDVSALLPSDFSRYYRYEGSLTTPPCSQGVIWTVFNETVKLSAKQLHTLSVSLWGPRDSRLQLNFRATQPLNGRTIEASFPAAEDSSPEPVHVNSCFTAGDILALVFGLLFAVTSIAFLLQLRRQHRHRSGTKDRVSYSPAEMTETGA

SEQ ID NO: 891 - DNA, 38 bp, synthetic construct
  source 1..38: mol_type = other DNA
atcgacgcgtgcctgagcgaggtgcagctggtgcagtc

SEQ ID NO: 892 - DNA, 32 bp, synthetic construct
  source 1..32: mol_type = other DNA
caatggtcaccgtctcttcagctagcaccagg

SEQ ID NO: 893 - DNA, 35 bp, synthetic construct
  source 1..35: mol_type = other DNA
atcccaagcttaagccagtctgtgctgactcagcc

SEQ ID NO: 894 - DNA, 31 bp, synthetic construct
  source 1..31: mol_type = other DNA
ggagggaccaaattgaccgtcctaggtcagc

SEQ ID NO: 895 - DNA, 41 bp, synthetic construct
  source 1..41: mol_type = other DNA
tagggcacgcgtgtgctgagcgaggtgcagctggtgcagtc

SEQ ID NO: 896 - DNA, 32 bp, synthetic construct
  source 1..32: mol_type = other DNA
tctagtgctagctgaagagacggtgaccattg

SEQ ID NO: 897 - DNA, 35 bp, synthetic construct
  source 1..35: mol_type = other DNA
ctagcaagcttatcccagtctgtgctgactcagcc

SEQ ID NO: 898 - DNA, 26 bp, synthetic construct
  source 1..26: mol_type = other DNA
atagcacctaggacggtcagcttggt

SEQ ID NO: 899 - protein, 5 aa, synthetic construct
SYAMS

SEQ ID NO: 900-901 - skipped (2 entries)

SEQ ID NO: 902 - protein, 17 aa, synthetic construct
  VARIANT 4..5: note = Any naturally occurring amino acid
  VARIANT 8: note = Any naturally occurring amino acid
  VARIANT 10..11: note = Any naturally occurring amino acid
AISXXGGXTXXADSVKG

SEQ ID NO: 903 - protein, 17 aa, synthetic construct
AISGSGGSTTTADSVKG

SEQ ID NO: 904 - protein, 13 aa, synthetic construct
  VARIANT 9: note = Any naturally occurring amino acid
NGNYRGSLXAFDI

SEQ ID NO: 905 - protein, 14 aa, synthetic construct
TGSSSNIGAGYDVH

SEQ ID NO: 906 - protein, 7 aa, synthetic construct
GNNNRPS

SEQ ID NO: 907 - protein, 12 aa, synthetic construct
QSYDSSLSAWVV

SEQ ID NO: 908 - protein, 6 aa, synthetic construct
EEDLPE

SEQ ID NO: 909 - protein, 10 aa, synthetic construct
NGNYRGAFDI

SEQ ID NO: 910 - protein, 5 aa, synthetic construct
TYAMT

SEQ ID NO: 911 - protein, 5 aa, synthetic construct
IYAMS

SEQ ID NO: 912 - protein, 5 aa, synthetic construct
SYGMH

SEQ ID NO: 913 - protein, 5 aa, synthetic construct
NYAMT

SEQ ID NO: 914 - protein, 5 aa, synthetic construct
KYAMS

SEQ ID NO: 915 - protein, 17 aa, synthetic construct
AISANGGTTYYADSVKG

SEQ ID NO: 916 - protein, 17 aa, synthetic construct
AVSGSGGSTYYADSVKG

SEQ ID NO: 917 - protein, 17 aa, synthetic construct
AISGSGGGTYHADSVKG

SEQ ID NO: 918 - protein, 17 aa, synthetic construct
AISGSGGSTYYADSVKG

SEQ ID NO: 919 - protein, 17 aa, synthetic construct
VISYDGSNKYYADSVKG

SEQ ID NO: 920 - protein, 17 aa, synthetic construct
LISYDGSVTHYTDSVKG

SEQ ID NO: 921 - protein, 17 aa, synthetic construct
AISGSGVSTYYADSVKG

SEQ ID NO: 922 - protein, 17 aa, synthetic construct
GISGSGGSTYYADSVKG

SEQ ID NO: 923 - protein, 10 aa, synthetic construct
GPVLRYGFDI

SEQ ID NO: 924 - protein, 9 aa, synthetic construct
FSAYSGYDL

SEQ ID NO: 925 - protein, 7 aa, synthetic construct
AAAGFDY

SEQ ID NO: 926 - protein, 10 aa, synthetic construct
IGRYSSSLGY

SEQ ID NO: 927 - protein, 13 aa, synthetic construct
EAPYSSSLDAFDI

SEQ ID NO: 928 - protein, 9 aa, synthetic construct
SHSSGGFDY

SEQ ID NO: 929 - protein, 7 aa, synthetic construct
GSGYQEH

SEQ ID NO: 930 - protein, 9 aa, synthetic construct
YGDYGSLDY

SEQ ID NO: 931 - protein, 13 aa, synthetic construct
YCSSTSCYRGMDV

SEQ ID NO: 932 - protein, 10 aa, synthetic construct
GRAARPPFDY

SEQ ID NO: 933 - protein, 12 aa, synthetic construct
SSRSGYFLPLDY

SEQ ID NO: 934 - protein, 9 aa, synthetic construct
AAVTGGFDP

SEQ ID NO: 935 - protein, 14 aa, synthetic construct
TGSSSNIGAGYDVH

SEQ ID NO: 936 - protein, 14 aa, synthetic construct
TGSRSNIGADYDVH

SEQ ID NO: 937 - protein, 14 aa, synthetic construct
TGSSSNIGRGYNVH

SEQ ID NO: 938 - protein, 14 aa, synthetic construct
TGTSSNIGAGYDVH

SEQ ID NO: 939 - protein, 11 aa, synthetic construct
GGNNIGSKSVH

SEQ ID NO: 940 - protein, 13 aa, synthetic construct
SGSSSNIGSNYVY

SEQ ID NO: 941 - protein, 11 aa, synthetic construct
QGNSLRYYYPS

SEQ ID NO: 942 - protein, 11 aa, synthetic construct
GGDNIGRKSVH

SEQ ID NO: 943 - protein, 7 aa, synthetic construct
GNSNRPS

SEQ ID NO: 944 - protein, 7 aa, synthetic construct
ANNNRPS

SEQ ID NO: 945 - protein, 7 aa, synthetic construct
DNTNRPS

SEQ ID NO: 946 - protein, 7 aa, synthetic construct
GNNNRPS

SEQ ID NO: 947 - protein, 7 aa, synthetic construct
DDTNRPS

SEQ ID NO: 948 - protein, 7 aa, synthetic construct
YDSDRPS

SEQ ID NO: 949 - protein, 7 aa, synthetic construct
RNNQRPS

SEQ ID NO: 950 - protein, 7 aa, synthetic construct
GKNNRPS

SEQ ID NO: 951 - protein, 7 aa, synthetic construct
DDRDRPS

SEQ ID NO: 952 - protein, 11 aa, synthetic construct
QSYDSRLSAWV

SEQ ID NO: 953 - protein, 10 aa, synthetic construct
QSYDRSLSWV

SEQ ID NO: 954 - protein, 11 aa, synthetic construct
QSYDSTLRVWM

SEQ ID NO: 955 - protein, 11 aa, synthetic construct
QSYDSSLRAWV

SEQ ID NO: 956 - protein, 11 aa, synthetic construct
QSYDSSLSAWV

SEQ ID NO: 957 - protein, 10 aa, synthetic construct
QSYDSGLRWV

SEQ ID NO: 958 - protein, 10 aa, synthetic construct
QSYDKSLTWV

SEQ ID NO: 959 - protein, 10 aa, synthetic construct
QSYDKSLSWV

SEQ ID NO: 960 - protein, 11 aa, synthetic construct
QSYDSSLSAWV

SEQ ID NO: 961 - protein, 10 aa, synthetic construct
HSRDNNGHHI

SEQ ID NO: 962 - protein, 12 aa, synthetic construct
QVWDSSSDHHVV

SEQ ID NO: 963 - protein, 11 aa, synthetic construct
AAWDDSLNGVV

SEQ ID NO: 964 - protein, 11 aa, synthetic construct
SSRDNTDNRVV

SEQ ID NO: 965 - protein, 11 aa, synthetic construct
QVWDSSSKHYV

SEQ ID NO: 966 - DNA, 354 bp, Homo sapiens
  source 1..354: mol_type = unassigned DNA
caggtgcagctggtgcagagcggagccgaggtgaagaagcctggagcttccgtcaaggtgtcctgcaaggccagcggctacaccttcgccagctactacatgcactggatgcggcaggcacctggacagggcctcgaatggatcggctggatcaaccccggcaacgtgaacaccaagtacaacgagaagttcaagggcagggccaccctgaccgtggacaccagcaccaacaccgcctacatggaactgagcagcctgcggagcgaggacaccgccgtgtactactgcgccagaagcacctactaccggcccctggactactggggccagggcaccctggtgaccgtgagcagc

SEQ ID NO: 967 - protein, 118 aa, Homo sapiens
QVQLVQSGAEVKKPGASVKVSCKASGYTFASYYMHWMRQAPGQGLEWIGWINPGNVNTKYNEKFKGRATLTVDTSTNTAYMELSSLRSEDTAVYYCARSTYYRPLDYWGQGTLVTVSS

SEQ ID NO: 968 - DNA, 336 bp, Homo sapiens
  source 1..336: mol_type = unassigned DNA
gacatcgtgatgacccagagccccgacagcctggccgtgagcctgggcgagcgggccaccatcaactgcaagagcagccagagcatcctgtacagcagcaaccagaagaactacctggcctggtatcagcagaagcccggccagagccccaagctgctgatctactgggccagcacccgggagagcggcgtgcccgaccggtttagcggcagcggctccggcaccgacttcaccctgaccatcagcagcctgcaggccgaggacgtggccgtgtactactgccaccagtacctgagcagctacaccttcggccagggcacaaagctggaaatcaag

SEQ ID NO: 969 - protein, 112 aa, Homo sapiens
DIVMTQSPDSLAVSLGERATINCKSSQSILYSSNQKNYLAWYQQKPGQSPKLLIYWASTRESGVPDRFSGSGSGTDFTLTISSLQAEDVAVYYCHQYLSSYTFGQGTKLEIK

SEQ ID NO: 970 - protein, 8 aa, Homo sapiens
GYTFASYY

SEQ ID NO: 971 - protein, 17 aa, Homo sapiens
WINPGNVNTKYNEKFKG

SEQ ID NO: 972 - protein, 9 aa, Homo sapiens
STYYRPLDY

SEQ ID NO: 973 - protein, 17 aa, Homo sapiens
KSSQSILYSSNQKNYLA

SEQ ID NO: 974 - protein, 7 aa, Homo sapiens
WASTRES

SEQ ID NO: 975 - protein, 8 aa, Homo sapiens
HQYLSSYT

SEQ ID NO: 976 - protein, 17 aa, Homo sapiens
  VARIANT 4..5: note = Any naturally occurring amino acid
  VARIANT 7: note = Any naturally occurring amino acid
  VARIANT 9: note = Any naturally occurring amino acid
WINXXNXNXKYNEKFKG

SEQ ID NO: 977 - protein, 9 aa, Homo sapiens
  VARIANT 2: note = Any naturally occurring amino acid
  VARIANT 4..5: note = Any naturally occurring amino acid
  VARIANT 9: note = Any naturally occurring amino acid
SXYXXPLDX

SEQ ID NO: 978 - protein, 17 aa, Homo sapiens
  VARIANT 6: note = Any naturally occurring amino acid
  VARIANT 10..13: note = Any naturally occurring amino acid
KSSQSXLYSXXXXNYLA

SEQ ID NO: 979 - protein, 7 aa, Homo sapiens
  VARIANT 4..5: note = Any naturally occurring amino acid
WASXXES

SEQ ID NO: 980 - protein, 8 aa, Homo sapiens
  VARIANT 5..6: note = Any naturally occurring amino acid
HQYLXXYT

SEQ ID NO: 981 - DNA, 369 bp, Homo sapiens
  source 1..369: mol_type = unassigned DNA
caggtgcagctggtgcagtctggggctgaggtgaagaagcctgggtcctcggtgaaggtctcctgcaaggcttctggaggcaccttcagtgacaatgctatcagctgggtgcgacaggccccaggacaagggcttgagtggatggggggcatcattcctatctttggaaaaccaaactacgcacagaagttccagggcagagtcacgattactgcggacgaatccacgagcacagcctacatggacctgaggagcctgagatctgaggacacggccgtttattactgtgcgagagattcagacgcgtattactatggttcggggggtatggacgtctggggccaaggcaccctggtcaccgtctcctca

SEQ ID NO: 982 - protein, 123 aa, Homo sapiens
QVQLVQSGAEVKKPGSSVKVSCKASGGTFSDNAISWVRQAPGQGLEWMGGIIPIFGKPNYAQKFQGRVTITADESTSTAYMDLRSLRSEDTAVYYCARDSDAYYYGSGGMDVWGQGTLVTVSS

SEQ ID NO: 983 - DNA, 335 bp, Homo sapiens
  source 1..335: mol_type = unassigned DNA
ctgcctgtgctgactcaatcatcctctgcctctgcttccctgggatcctcggtcaagctcacctgcactctgagcagtgggcatagtaactacatcatcgcatggcatcaacagcagccagggaaggcccctcggtacttgatgaaggttaatagtgatggcagccacaccaagggggacgggatccctgatcgcttctcaggctccagctctggggctgaccgctacctcaccatctccaacctccagtctgaggatgaggctagttatttctgtgagacctgggacactaagattcatgtcttcggaactgggaccaaggtctccgtcctcag

SEQ ID NO: 984 - protein, 111 aa, Homo sapiens
LPVLTQSSSASASLGSSVKLTCTLSSGHSNYIIAWHQQQPGKAPRYLMKVNSDGSHTKGDGIPDRFSGSSSGADRYLTISNLQSEDEASYFCETWDTKIHVFGTGTKVSVL

SEQ ID NO: 985 - DNA, 363 bp, Homo sapiens
  source 1..363: mol_type = unassigned DNA
caggtgcagctggtgcagtctggggctgaggtgaagaagcctgggtcctcggtgaaggtctcctgcaaggctcctggaggtatcttcaacaccaatgctttcagctgggtccgacaggcccctggacaaggtcttgagtgggtgggaggggtcatccctttgtttcgaacagcaagctacgcacagaacgtccagggcagagtcaccattaccgcggacgaatccacgaacacagcctacatggagcttaccagcctgagatctgcggacacggccgtgtattactgtgcgagaagtagtggttaccattttaggagtcactttgactcctggggcctgggaaccctggtcaccgtctcctca

SEQ ID NO: 986 - protein, 121 aa, Homo sapiens
QVQLVQSGAEVKKPGSSVKVSCKAPGGIFNTNAFSWVRQAPGQGLEWVGGVIPLFRTASYAQNVQGRVTITADESTNTAYMELTSLRSADTAVYYCARSSGYHFRSHFDSWGLGTLVTVSS

SEQ ID NO: 987 - DNA, 363 bp, Homo sapiens
  source 1..363: mol_type = unassigned DNA
caggtgcagctggtgcaatctggggctgaggtgaagaagcctgggtcctcggtgaaggtctcctgcaaggctcctggaggtatcttcaacaccaatgctttcagctgggtccgacaggcccctggacaaggtcttgagtgggtgggaggggtcatccctttgtttcgaacagcaagctacgcacagaacgtccagggcagagtcaccattaccgcggacgaatccacgaacacagcctacatggagcttaccagcctgagatctgcggacacggccgtgtattactgtgcgagaagtagtggttaccattttaggagtcactttgactcctggggcctgggaaccctggtcaccgtctcctca

SEQ ID NO: 988 - protein, 111 aa, Homo sapiens
NFMLTQPHSVSASPGKTVTISCTGSSGNIAANYVQWYQQRPGSAPTTVIYEDDRRPSGVPDRFSGSIDRSSNSASLTISGLKTEDEADYYCQTYDTNNHAVFGGGTHLTVL

SEQ ID NO: 989 - DNA, 333 bp, Homo sapiens
  source 1..333: mol_type = unassigned DNA
aattttatgctgactcagccccactctgtgtcggcgtctccggggaagacggtgaccatctcctgcaccggcagcagtggcaacattgccgccaactatgtgcagtggtaccaacaacgtccgggcagtgcccccactactgtgatctatgaggatgaccgaagaccctctggggtccctgatcggttctctggctccatcgacaggtcctccaactctgcctccctcaccatctcaggactgaagactgaggacgaggctgactactactgtcagacttatgataccaacaatcatgctgtgttcggaggaggcacccacctgaccgtcctc

SEQ ID NO: 990 - protein, 110 aa, Homo sapiens
SYELTQPPSASGKHGQRVTISCSGGTSNIGRNHVNWYQQLPGTAPKLLIYSNEQRPSGVPDRFSGSKSGTSASLAVSGLQSEDEADYYCASWDDNLSGWVFGGGTKLTVL

SEQ ID NO: 991 - DNA, 330 bp, Homo sapiens
  source 1..330: mol_type = unassigned DNA
tcctatgagctgactcagccaccctcagcgtctgggaaacacgggcagagggtcaccatctcttgttctggaggcacctccaacatcggacgtaatcatgttaactggtaccagcaactcccaggaacggcccccaaactcctcatctatagtaatgaacagcggccctcaggggtccctgaccgattctctggctccaaatctggcacctccgcctccctggccgtgagtgggctccagtctgaggatgaggctgattattactgtgcatcatgggatgacaacttgagtggttgggtgttcggcggagggaccaagctgaccgtccta

SEQ ID NO: 992 - protein, 120 aa, Homo sapiens
QVQLVQSGAEVKKPGSSVKVSCKASGGTFSAYAFTWVRQAPGQGLEWMGGITGMFGTANYAQKFQGRVTITADELTSTAYMELSSLTSEDTALYYCARGLYYYESSLDYWGQGTLVTVSS

SEQ ID NO: 993 - DNA, 361 bp, Homo sapiens
  source 1..361: mol_type = unassigned DNA
caggtgcagctggtgcagtctggggctgaggtgaagaagcctgggtcctcggtgaaggtctcctgcaaggcttctggaggcaccttcagcgcttatgctttcacctgggtgcggcaggcccctggacaagggcttgagtggatgggaggcatcaccggaatgtttggcacagcaaactacgcacagaagttccagggcagagtcacgattaccgcggacgaactcacgagcacagcctacatggagttgagctccctgacatctgaagacacggccctttattattgtgcgagaggattgtattactatgagagtagtcttgactattggggccagggaaccctggtcaccgtctcctcag

SEQ ID NO: 994 - protein, 110 aa, Homo sapiens
QSVLTQPPSASGSPGQSVTISCTGTSSDVGGYNSVSWYQQHPGKAPKLMIYEVTKRPSGVPDRFSASKSGNTASLTVSGLQAEDEADYFCCSYAGHSAYVFGTGTKVTVL

SEQ ID NO: 995 - DNA, 361 bp, Homo sapiens
  source 1..361: mol_type = unassigned DNA
caggtgcagctggtgcagtctggggctgaggtgaagaagcctgggtcctcggtgaaggtctcctgcagggcttctggaggcaccttcagcgcttatgctttcacctgggtgcggcaggcccctggacaagggcttgagtggatgggaggcatcaccggaatgtttggcacagcaaactacgcacagaagttccagggcagagtcacgattaccgcggacgaactcacgagcacagcctacatggagttgagctccctgacatctgaagacacggccctttattattgtgcgagaggattgtattactatgagagtagtcttgactattggggccagggaaccctggtcaccgtctcctcag

SEQ ID NO: 996 - protein, 108 aa, Homo sapiens
EIVLTQSPGTLSLSPGERATLSCRASQSLSSKYLAWYQQKPGQAPRLLIYGASSRATGIPDRFSGSGSGTDFTLTISRLEPEDFAVYSCQQYDGVPRTFGQGTTVEIK

SEQ ID NO: 997 - DNA, 330 bp, Homo sapiens
  source 1..330: mol_type = unassigned DNA
cagtctgtgctgactcagccaccctccgcgtccgggtctcctggacagtcagtcaccatctcctgcactggaaccagcagtgacgttggtggttataactctgtctcctggtaccaacagcacccaggcaaagcccccaaactcatgatttatgaggtcactaagcggccctcaggggtccctgatcgcttctctgcctccaagtctggcaacacggcctccctgaccgtctctgggctccaggctgaggatgaggctgattatttctgctgctcatatgcaggccacagtgcttatgtcttcggaactgggaccaaggtcaccgtcctg

SEQ ID NO: 998 - protein, 124 aa, Homo sapiens
QVQLVQSGAEVKKPGSSVKVSCTSSEVTFSSFAISWVRQAPGQGLEWLGGISPMFGTPNYAQKFQGRVTITADQSTRTAYMDLRSLRSEDTAVYYCARSPSYICSGGTCVFDHWGQGTLVTVSS

SEQ ID NO: 999 - DNA, 324 bp, Homo sapiens
  source 1..324: mol_type = unassigned DNA
gaaattgtgctgactcagtctccaggcaccctgtctttgtctccaggggaaagagccaccctctcctgcagggccagtcagagtcttagcagcaagtacttagcctggtatcagcagaaacctggccaggctcccaggctcctcatctatggtgcatccagcagggccactggcatcccagacaggttcagtggcagtgggtctgggacagacttcaccctcaccatcagtagactggagcctgaagattttgcagtgtattcctgtcagcagtatgatggcgtacctcggacgttcggccaagggaccacggtggaaatcaaa

SEQ ID NO: 1000 - protein, 110 aa, Homo sapiens
QPGLTQPPSVSKGLRQTATLTCTGNSNNVGNQGAAWLQQHQGHPPKLLSYRNNDRPSGISERFSASRSGNTASLTITGLQPEDEADYYCSTWDSSLSAVVFGGGTKLTVL

SEQ ID NO: 1001 - DNA, 372 bp, Homo sapiens
  source 1..372: mol_type = unassigned DNA
caggtgcagctggtgcagtcaggggctgaggtgaagaagcctgggtcctcggtgaaggtctcctgcacgtcctctgaagtcaccttcagtagttttgctatcagctgggtgcgacaggcccctggacaagggcttgagtggctgggagggatcagccctatgtttggaacacctaattacgcgcagaagttccaaggcagagtcaccattaccgcggaccagtccacgaggacagcctacatggacctgaggagcctgagatctgaggacacggccgtgtattattgtgcgagatctccttcttacatttgttctggtggaacctgcgtctttgaccattggggccagggaaccctggtcaccgtctcctca

SEQ ID NO: 1002 - protein, 107 aa, Homo sapiens
DIQMTQSPSSLSASVGDRVTITCRASQSISSYLNWYQQKPGKAPKLLIYAASSLQRGVPSRFSGSGSGTDFTLTISSLQPEDFAVYYCQQYDSSPYTFGQGTKVEIK

SEQ ID NO: 1003 - DNA, 372 bp, Homo sapiens
  source 1..372: mol_type = unassigned DNA
caggtacagctgcagcagtcaggggctgaggtgaagaagcctgggtcctcggtgaaggtctcctgcacgtcctctgaagtcaccttcagtagttttgctatcagctgggtgcgacaggcccctggacaagggcttgagtggctgggagggatcagccctatgtttggaacacctaattacgcgcagaagttccaaggcagagtcaccattaccgcggaccagtccacgaggacagcctacatggacctgaggagcctgagatctgaggacacggccgtgtattattgtgcgagatctccttcttacatttgttctggtggaacctgcgtctttgaccattggggccagggaaccctggtcaccgtctcctca

SEQ ID NO: 1004 - protein, 122 aa, Homo sapiens
QVQLVQSGAEVKKPGASVKVSCKTSGVTFSSYAISWVRQAPGQGLEWMGGIIGVFGVPKYAQNFQGRVTITADKPTSTVYMELNSLRAEDTAVYYCAREPGYYVGKNGFDVWGQGTMVTVSS

SEQ ID NO: 1005 - DNA, 330 bp, Homo sapiens
  source 1..330: mol_type = unassigned DNA
cagcctgggctgactcagccaccctcggtgtccaagggcttgagacagaccgccacactcacctgcactgggaacagcaacaatgttggcaaccaaggagcagcttggctgcagcagcaccagggccaccctcccaaactcctatcctacaggaataatgaccggccctcagggatctcagagagattctctgcatccaggtcaggaaacacagcctccctgaccattactggactccagcctgaggacgaggctgactattactgctcaacatgggacagcagcctcagtgctgtggtattcggcggagggaccaagctgaccgtccta

SEQ ID NO: 1006 - protein, 110 aa, Homo sapiens
SYELTQPPSVSKGLRQTAILTCTGDSNNVGHQGTAWLQQHQGHPPKLLSYRNGNRPSGISERFSASRSGNTASLTIIGLQPEDEADYYCSVWDSSLSAWVFGGGTKLTVL

SEQ ID NO: 1007 - DNA, 321 bp, Homo sapiens
  source 1..321: mol_type = unassigned DNA
gacatccagatgacccagtctccatcctccctgtctgcatctgtaggagacagagtcaccatcacttgccgggcaagtcagagcattagcagctatttaaattggtatcagcagaaaccagggaaagcccctaagctcctgatctatgctgcatccagtttgcaaagaggggtcccatcaaggttcagtggcagtggatctgggacagacttcactctcaccattagcagcctgcagcctgaagattttgcagtgtattactgtcagcagtatgatagttcaccgtacacttttggccaggggaccaaggtagagatcaaa

SEQ ID NO: 1008 - protein, 126 aa, Homo sapiens
QVQLVQSGAEVRKPGASVKVSCKASGYTFTGYYIHWVRQAPGQGLEWMGWINPMTGGTNYAQKFQVWVTMTRDTSINTAYMEVSRLTSDDTAVYYCARGASVLRYFDWQPEALDIWGLGTTVTVSS

SEQ ID NO: 1009 - DNA, 366 bp, Homo sapiens
  source 1..366: mol_type = unassigned DNA
caggtgcagctggtgcaatctggggctgaagtgaagaagcctggggcctcagtgaaggtctcctgcaagacttctggagtcaccttcagcagctatgctatcagttgggtgcgacaggcccctggacaagggcttgagtggatgggagggatcatcggtgtctttggtgtaccaaagtacgcgcagaacttccagggcagagtcacaattaccgcggacaaaccgacgagtacagtctacatggagctgaacagcctgagagctgaggacacggccgtgtattactgtgcgagagagcccgggtactacgtaggaaagaatggttttgatgtctggggccaagggacaatggtcaccgtctcttca

SEQ ID NO: 1010 - protein, 108 aa, Homo sapiens
QPVLTQPPSVSVAPGQTASIPCGGNNIGGYSVHWYQQKPGQAPLLVIYDDKDRPSGIPERFSGANSGSTATLTISRVEAGDEGDYYCQVWDSGNDRPLFGGGTKLTVL

SEQ ID NO: 1011 - DNA, 330 bp, Homo sapiens
  source 1..330: mol_type = unassigned DNA
tcctatgagctgactcagccaccctcggtgtccaagggcttgagacagaccgccatactcacctgcactggagacagcaacaatgttggccaccaaggtacagcttggctgcaacaacaccagggccaccctcccaaactcctatcctacaggaatggcaaccggccctcagggatctcagagagattctctgcatccaggtcaggaaatacagcctccctgaccattattggactccagcctgaggacgaggctgactactactgctcagtatgggacagcagcctcagtgcctgggtgttcggcggagggaccaagctgaccgtccta

SEQ ID NO: 1012 - protein, 123 aa, Homo sapiens
QVQLVQSGAEVKKPGSSVKVSCKASGGPFSMTAFTWLRQAPGQGLEWMGGISPIFRTPKYAQKFQGRVTITADESTNTANMELTSLKSEDTAVYYCARTLSSYQPNNDAFAIWGQGTMVTVSS

SEQ ID NO: 1013 - DNA, 378 bp, Homo sapiens
  source 1..378: mol_type = unassigned DNA
caggtgcagctggtgcagtctggggctgaggtgaggaagcctggggcctcagtgaaggtctcatgtaaggcttctggatacaccttcaccggttattatattcactgggtgcgacaggcccctggacaaggacttgagtggatgggttggatcaaccctatgactggtggcacaaactatgcacagaagtttcaggtctgggtcaccatgacccgggacacgtccatcaacacagcctacatggaggtgagcaggctgacatctgacgacacggccgtgtattactgtgcgaggggggcttccgtattacgatattttgactggcagcccgaggctcttgatatctggggcctcgggaccacggtcaccgtctcctca

SEQ ID NO: 1014 - protein, 106 aa, Homo sapiens
EIVLTQSPATLSLSPGERATLSCRASQSVSSYLAWYQQKPGQAPRLLIYDASNRATGIPARFSGSGSGTDFTLTISRLEPEDFAVYFCQQYGSSPQFGQGTRLEIK

SEQ ID NO: 1015 - DNA, 324 bp, Homo sapiens
  source 1..324: mol_type = unassigned DNA
cagcctgtgctgactcagccaccctcggtgtcagtggccccaggacagacggccagcattccctgtggggggaacaacattggaggctacagtgtacactggtaccaacaaaagccgggccaggcccccctcttggtcatttatgacgataaagaccggccctcagggatccctgagcgattctctggcgccaactctgggagcacggccaccctgacaatcagcagggtcgaagccggggatgagggcgactactactgtcaggtgtgggatagtggtaatgatcgtccgctgttcggcggagggaccaagctgaccgtccta

SEQ ID NO: 1016 - protein, 123 aa, Homo sapiens; identical to SEQ ID NO: 1012

SEQ ID NO: 1017 - DNA, 369 bp, Homo sapiens
  source 1..369: mol_type = unassigned DNA
caggtgcagctggtgcagtctggggctgaagtgaagaagcctggctcctcggtgaaggtttcctgcaaggcttctggaggccccttcagcatgactgctttcacctggctgcgacaggcccctggacaagggcttgagtggatgggtgggatcagccctatctttcgtacaccgaagtacgcacagaagttccagggcagagtcacgattaccgcggacgaatccacgaacacagccaacatggagctgaccagcctgaaatctgaggacacggccgtgtattactgtgcgagaaccctttcctcctaccaaccgaataatgatgcttttgctatctggggccaagggacaatggtcaccgtctcttca

SEQ ID NO: 1018 - protein, 110 aa, Homo sapiens
LPVLTQPPSASGTPGQRVTISCSGSSSNIGSNTVNWYQQLPGTAPKLLIYSNNQRPSGVPDRFSGSRSGTSASLAIIGLRPEDEADYYCQSYDSRLSASLFGTGTTVTVL

SEQ ID NO: 1019 - DNA, 318 bp, Homo sapiens
  source 1..318: mol_type = unassigned DNA
gaaattgtgttgacgcagtctccagccaccctgtctttgtctccaggggaaagagccaccctctcctgcagggccagtcagagtgttagcagctacttagcctggtaccaacagaaacctggccaggctcccaggctcctcatctatgatgcatccaacagggccactggcatcccagccaggttcagtggcagtgggtctgggacagacttcactctcaccatcagcagactggagcctgaagattttgcagtctatttctgtcagcagtatggtagctcacctcaattcggccaagggacacgactggagattaaa

SEQ ID NO: 1020 - DNA, 369 bp, Homo sapiens; identical to SEQ ID NO: 1017
  source 1..369: mol_type = unassigned DNA

SEQ ID NO: 1021 - skipped

SEQ ID NO: 1022 - DNA, 330 bp, Homo sapiens
  source 1..330: mol_type = unassigned DNA
ctgcctgtgctgactcagccaccctcagcgtctgggacccccgggcagagggtcaccatctcttgttctggaagcagctccaacatcggaagtaatactgtaaactggtaccagcagctcccaggaacggcccccaaactcctcatctatagtaataatcagcggccctcaggggtccctgaccgattctctggctccaggtcaggcacctcagcctccctggccatcattggactccggcctgaggatgaagctgattattactgtcagtcgtatgacagcaggctcagtgcttctctcttcggaactgggaccacggtcaccgtcctc

SEQ ID NO: 1023 - protein, 5 aa, synthetic construct
SYAFS

SEQ ID NO: 1024 - protein, 5 aa, Homo sapiens
TNAFS

SEQ ID NO: 1025 - protein, 5 aa, Homo sapiens
AYAFT

SEQ ID NO: 1026 - protein, 5 aa, Homo sapiens
SFAIS

SEQ ID NO: 1027 - protein, 5 aa, Homo sapiens
SYAIS

SEQ ID NO: 1028 - protein, 5 aa, Homo sapiens
GYYIH

SEQ ID NO: 1029 - protein, 5 aa, Homo sapiens
MTAFT

SEQ ID NO: 1030 - protein, 5 aa, Homo sapiens
DNAIS

SEQ ID NO: 1031 - protein, 17 aa, synthetic construct
GIIPMFGTPNYAQKFQG

SEQ ID NO: 1032 - protein, 17 aa, Homo sapiens
GVIPLFRTASYAQNVQG

SEQ ID NO: 1033 - protein, 17 aa, Homo sapiens
GIIGMFGTANYAQKFQG

SEQ ID NO: 1034 - protein, 17 aa, Homo sapiens
GISPMFGTPNYAQKFQG

SEQ ID NO: 1035 - protein, 17 aa, Homo sapiens
GIIGVFGVPKYAQKFQG

SEQ ID NO: 1036 - protein, 17 aa, Homo sapiens
WINPMTGGTNYAQKFQV

SEQ ID NO: 1037 - protein, 17 aa, Homo sapiens
GISPIFRTPKYAQKFQG

SEQ ID NO: 1038 - protein, 17 aa, Homo sapiens
GIIPIFGKPNYAQKFQG

SEQ ID NO: 1039 - protein, 12 aa, synthetic construct
SSGYYYGGGFDV

SEQ ID NO: 1040 - protein, 13 aa, Homo sapiens
SSGYHFGRSHFDS

SEQ ID NO: 1041 - protein, 11 aa, Homo sapiens
GLYYYESSLDY

SEQ ID NO: 1042 - protein, 15 aa, Homo sapiens
SPSYICSGGTCVFDH

SEQ ID NO: 1043 - protein, 13 aa, Homo sapiens
EPGYYVGKNGFDV

SEQ ID NO: 1044 - protein, 17 aa, Homo sapiens
GASVLRYFDWQPEALDI

SEQ ID NO: 1045 - protein, 14 aa, Homo sapiens
TLSSYQPNNDAFAI

SEQ ID NO: 1046 - protein, 14 aa, Homo sapiens
DSDAYYYGSGGMDV

SEQ ID NO: 1047 - protein, 12 aa, Homo sapiens
TGSSSNIGNYVA

SEQ ID NO: 1048 - protein, 13 aa, Homo sapiens
TGSSSNIAANYVQ

SEQ ID NO: 1049 - protein, 14 aa, synthetic construct
TGTSSDVGGYNSVS

SEQ ID NO: 1050 - protein, 13 aa, Homo sapiens
TGNSNNVGNQGAA

SEQ ID NO: 1051 - protein, 13 aa, Homo sapiens
TGDSNNVGHQGTA

SEQ ID NO: 1052 - protein, 11 aa, Homo sapiens
GGNNIGGYSVH

SEQ ID NO: 1053 - protein, 11 aa, Homo sapiens
RASQSVSSYLA

SEQ ID NO: 1054 - protein, 12 aa, Homo sapiens
RASQSLSSKYLA

SEQ ID NO: 1055 - protein, 12 aa, Homo sapiens
TGSSSNIGNYVA

SEQ ID NO: 1056 - protein, 13 aa, Homo sapiens
SGSSSNIGSNTVN

SEQ ID NO: 1057 - protein, 11 aa, Homo sapiens
RASQSISSYLN

SEQ ID NO: 1058 - protein, 12 aa, Homo sapiens
TLSSGHSNYIIA

SEQ ID NO: 1059 - protein, 7 aa, synthetic construct
SNSDRPS

SEQ ID NO: 1060 - protein, 7 aa, Homo sapiens
EDDRRPS

SEQ ID NO: 1061 - protein, 7 aa, Homo sapiens
EVTKRPS

SEQ ID NO: 1062 - protein, 7 aa, Homo sapiens
RNNDRPS

SEQ ID NO: 1063 - protein, 7 aa, Homo sapiens
RNGNRPS

SEQ ID NO: 1064 - protein, 7 aa, Homo sapiens
DDKDRPS

SEQ ID NO: 1065 - protein, 7 aa, Homo sapiens
DASNRAT

SEQ ID NO: 1066 - protein, 7 aa, Homo sapiens
GASSRAT

SEQ ID NO: 1067 - protein, 7 aa, Homo sapiens
SNNQRPS

SEQ ID NO: 1068 - protein, 7 aa, Homo sapiens
AASSLQR

SEQ ID NO: 1069 - protein, 7 aa, Homo sapiens
SNEQRPS

SEQ ID NO: 1070 - protein, 11 aa, Homo sapiens
VNSDGSHTKGD

SEQ ID NO: 1071 - protein, 10 aa, synthetic construct
QSYDSLSAYV

SEQ ID NO: 1072 - protein, 10 aa, Homo sapiens
QSYDTNNHAV

SEQ ID NO: 1073 - protein, 10 aa, Homo sapiens
CSYAGHSAYV

SEQ ID NO: 1074 - protein, 11 aa, Homo sapiens
STWDSSLSAVV

SEQ ID NO: 1075 - protein, 11 aa, Homo sapiens
SVWDSSLSAWV

SEQ ID NO: 1076 - protein, 11 aa, Homo sapiens
QVWDSGNDRPL

SEQ ID NO: 1077 - protein, 9 aa, Homo sapiens
QQYGSSPQV

SEQ ID NO: 1078 - protein, 9 aa, Homo sapiens
QQYDGVPRT

SEQ ID NO: 1079 - protein, 11 aa, Homo sapiens
QSYDSRLSASL

SEQ ID NO: 1080 - protein, 9 aa, Homo sapiens
QQYDSSPYT

SEQ ID NO: 1081 - protein, 11 aa, Homo sapiens
ASWDDNLSGWV

SEQ ID NO: 1082 - protein, 9 aa, Homo sapiens
ETWDTKIHV

SEQ ID NO: 1083 - protein, 10 aa, synthetic construct
GTETSQVAPA

SEQ ID NO: 1084 - protein, 6 aa, synthetic construct
HHHHHH

SEQ ID NO: 1085 - protein, 4 aa, Influenza A virus
INGW

SEQ ID NO: 1086 - protein, 4 aa, Influenza A virus
IDGW

SEQ ID NO: 1087 - protein, 4 aa, Influenza A virus
VAGW

SEQ ID NO: 1088 - protein, 4 aa, Influenza A virus
VDGW

SEQ ID NO: 1089 - protein, 4 aa, Influenza A virus
IAGW

SEQ ID NO: 1090 - protein, 87 aa, Homo sapiens
KKPGSSVKVSCKASGGTFSSYAISWVRQAPGQGLEWMGGIIPMFGTPNYAQKFQGRVTITADESTSTAYMELSSLRSEDTAVYYCAR

SEQ ID NO: 1091 - protein, 87 aa, Homo sapiens
KKPGSSVKVSCKASGGTFSSYAISWVRQAPGQGLEWMGGIIPIFGTPNYAQKFQGRVTITADESTSTAYMELSSLRSEDTAVYYCAR

SEQ ID NO: 1092 - protein, 108 aa, Homo sapiens
KKPGSSVKVSCTSSEVTFSSFAISWVRQAPGQGLEWLGGISPMFGTPNYAQKFQGRVTITADQSTRTAYMDLRSLRSEDTAVYYCARSPSYICSGGTCVFDHWGQGTL

SEQ ID NO: 1093 - protein, 104 aa, Homo sapiens
KKPGSSVKVSCKASGGTFSAYAFTWVRQAPGQGLEWMGGIIGMFGTANYAQKFQGRVTITADELTSTAYMELSSLTSEDTALYYCARGLYYYESSFDYWGQGTL

SEQ ID NO: 1094 - protein, 107 aa, Homo sapiens
KKPGSSVKVSCKASGGPFSMTAFTWLRQAPGQGLEWMGGISPIFRTPKYAQKFQGRVTITADESTNTANMELTSLKSEDTAVYYCARTLSSYQPNNDAFAIWGQGTM

SEQ ID NO: 1095 - protein, 106 aa, Homo sapiens
KKPGASVKVSCKTSGVTFSSYAISWVRQAPGQGLEWMGGIIGVFGVPKYAQKFQGRVTITADKPTSTVYMELNSLRAEDTAVYYCAREPGYYVGKNGFDVWGQGTM

SEQ ID NO: 1096 - protein, 105 aa, Homo sapiens
KKPGSSVKVSCKAPGGIFNTNAFSWVRQAPGQGLEWVGGVIPLFRTASYAQNVQGRVTITADESTNTAYMELTSLRSADTAVYYCARSSGYHFRSHFDSWGLGTL

SEQ ID NO: 1097 - protein, 110 aa, Homo sapiens
RKPGASVKVSCKASGYTFTGYYIHWVRQAPGQGLEWMGWINPMTGGTNYAQKFQVWVTMTRDTSINTAYMEVTRLTSDDTAVYYCARGASVLRYFDWQPEALDIWGLGTT

SEQ ID NO: 1098 - protein, 8 aa, Homo sapiens
GGTFSSYA

SEQ ID NO: 1099 - protein, 8 aa, Homo sapiens
GGTFSSYA

SEQ ID NO: 1100 - protein, 8 aa, Homo sapiens
EVTFSSFA

SEQ ID NO: 1101 - protein, 8 aa, Homo sapiens
GGTFSAYA

SEQ ID NO: 1102 - protein, 8 aa, Homo sapiens
GGPFSMTA

SEQ ID NO: 1103 - protein, 8 aa, Homo sapiens
GVTFSSYA

SEQ ID NO: 1104 - protein, 8 aa, Homo sapiens
GGIFNTNA

SEQ ID NO: 1105 - protein, 8 aa, Homo sapiens
GYTFTGYY

SEQ ID NO: 1106 - protein, 8 aa, Homo sapiens
IIPMFGTP

SEQ ID NO: 1107 - protein, 8 aa, Homo sapiens
IIPIFGTP

SEQ ID NO: 1108 - protein, 8 aa, Homo sapiens
ISPMFGTP

SEQ ID NO: 1109 - protein, 8 aa, Homo sapiens
IIGMFGTA

SEQ ID NO: 1110 - protein, 8 aa, Homo sapiens
ISPIFRTP

SEQ ID NO: 1111 - protein, 8 aa, Homo sapiens
IIGVFGVP

SEQ ID NO: 1112 - protein, 8 aa, Homo sapiens
VIPLFRTA

SEQ ID NO: 1113 - protein, 8 aa, Homo sapiens
INPMTGGT

SEQ ID NO: 1114 - protein, 17 aa, Homo sapiens
ARSPSYICSGGTCVFDH

SEQ ID NO: 1115 - protein, 13 aa, Homo sapiens
ARGLYYYESSFDY

SEQ ID NO: 1116 - protein, 16 aa, Homo sapiens
ARTLSSYQPNNDAFAI

SEQ ID NO: 1117 - protein, 15 aa, Homo sapiens
AREPGYYVGKNGFDV

SEQ ID NO: 1118 - protein, 14 aa, Homo sapiens
ARSSGYHFRSHFDS

SEQ ID NO: 1119 - protein, 19 aa, Homo sapiens
ARGASVLRYFDWQPEALDI

SEQ ID NO: 1120 - protein, 8 aa, Homo sapiens
SGNIAANY

SEQ ID NO: 1121 - protein, 9 aa, Homo sapiens
SSDVGGYNS

SEQ ID NO: 1122 - protein, 8 aa, Homo sapiens
SNNVGNQG

SEQ ID NO: 1123 - protein, 8 aa, Homo sapiens
SNNVGHQG

SEQ ID NO: 1124 - protein, 6 aa, Homo sapiens
NIGGYS

SEQ ID NO: 1125 - protein, 7 aa, Homo sapiens
QSSVSSY

SEQ ID NO: 1126 - protein, 7 aa, Homo sapiens
QSLSSKY

SEQ ID NO: 1127 - protein, 8 aa, Homo sapiens
SSNIGSNT

SEQ ID NO: 1128 - protein, 6 aa, Homo sapiens
QSISSY

SEQ ID NO: 1129 - protein, 8 aa, Homo sapiens
TSNIGRNH

SEQ ID NO: 1130-1139 - skipped (10 entries)

SEQ ID NO: 1140 - protein, 10 aa, Homo sapiens
QTYDTNNHAV

SEQ ID NO: 1141 - protein, 10 aa, Homo sapiens
CSYAGHSAYV

SEQ ID NO: 1142 - protein, 11 aa, Homo sapiens
STWDSSLSAVV

SEQ ID NO: 1143 - protein, 11 aa, Homo sapiens
SVWDSSLSAWV

SEQ ID NO: 1144 - protein, 11 aa, Homo sapiens
QVWDSGNDRPL

SEQ ID NO: 1145 - protein, 8 aa, Homo sapiens
QQYGSSPQ

SEQ ID NO: 1146 - protein, 9 aa, Homo sapiens
QQYDGVPRT

SEQ ID NO: 1147 - protein, 11 aa, Homo sapiens
QSYDSRLSASL

SEQ ID NO: 1148 - protein, 9 aa, Homo sapiens
QQYDSSPYT

SEQ ID NO: 1149 - protein, 11 aa, Homo sapiens
ASWDDNLSGWV

SEQ ID NO: 1150 - skipped

SEQ ID NO: 1151 - protein, 10 aa, Homo sapiens
QVQLVQGAEV

SEQ ID NO: 1152 - protein, 5 aa, Homo sapiens
VTVSS

SEQ ID NO: 1153 - DNA, 354 bp, Homo sapiens
  source 1..354: mol_type = unassigned DNA
caggtccagctcgtccagtccggcgctgaagtggtgaaacccggggcatccgtcaaagtctcttgtaaggctagtggctacaccttcacatcctactggatgcattgggtgaaacaggcacctggccagggactcgaatggatcggagccgtgtctcctggaaattccgacacctcctacaacgaaaaattcaagggcaaggcaaccctcactgtggatactagtgcttctaccgcctacatggaactctcatctctccgctctgaggacactgccgtctactactgtactcggtcacgatacgggaacaacgctctcgattactggggacagggcacactggtcactgtctct

SEQ ID NO: 1154 - protein, 118 aa, Homo sapiens
QVQLVQSGAEVVKPGASVKVSCKASGYTFTSYWMHWVKQAPGQGLEWIGAVSPGNSDTSYNEKFKGKATLTVDTSASTAYMELSSLRSEDTAVYYCTRSRYGNNALDYWGQGTLVTVS

SEQ ID NO: 1155 - DNA, 321 bp, Homo sapiens
  source 1..321: mol_type = unassigned DNA
gatattcagctcacacagagcccatcttctctgtctgcttctgtgggcgatcgagtgacaatcacttgtcgggctagtcagggcatttctagcaacattgtgtggctccagcagaaacctggcaaagccccaaaaggcctcatctaccacggaaccaacctggaatctggcgtgccatctcggtttagtggatctggatccgggaccgattacacactcaccatctcttcactggaacctgaggatttcgccacctactactgtgtccagtactcccagtttccacccacttttggacagggaaccaaactcgagatcaaa

SEQ ID NO: 1156 - protein, 107 aa, Homo sapiens
DIQLTQSPSSLSASVGDRVTITCRASQGISSNIVWLQQKPGKAPKGLIYHGTNLESGVPSRFSGSGSGTDYTLTISSLEPEDFATYYCVQYSQFPPTFGQGTKLEIK

SEQ ID NO: 1157 - protein, 8 aa, Homo sapiens
GYTFTSYW

SEQ ID NO: 1158 - protein, 8 aa, Homo sapiens
VSPGNSDT

SEQ ID NO: 1159 - protein, 12 aa, Homo sapiens
TRSRYGNNALDY

SEQ ID NO: 1160 - protein, 9 aa, Homo sapiens
QGISSNIVW

SEQ ID NO: 1161 - skipped

SEQ ID NO: 1162 - protein, 9 aa, Homo sapiens
VQYSQFPPT

SEQ ID NO: 1163 - DNA, 354 bp, Homo sapiens
  source 1..354: mol_type = unassigned DNA
caggtccagctcgtccagtccggcgctgaagtggtgaaacccggggcatccgtcaaagtctcttgtaaggctagtggctacaccttcacatcctactggatgcattgggtgaaacaggcacctggccagggactcgaatggatcggagccgtgtctcctggaaattccgacacctcctacaacgaaaaattcaagggcaaggcaaccctcactgtggacaaatctgcctctaccgcctacatggaactctcatctctccgctctgaggatactgctgtgtactactgtacccggtcacgatacggcaataacgccctcgattactgggggcagggaactctggtcactgtgtct

SEQ ID NO: 1164 - protein, 118 aa, Homo sapiens
QVQLVQSGAEVVKPGASVKVSCKASGYTFTSYWMHWVKQAPGQGLEWIGAVSPGNSDTSYNEKFKGKATLTVDKSASTAYMELSSLRSEDTAVYYCTRSRYGNNALDYWGQGTLVTVS

SEQ ID NO: 1165 - DNA, 357 bp, Mus musculus
  source 1..357: mol_type = unassigned DNA
caggtccagctgcagcagtctgggactgtgctcgcaaggcctggggcttcagtgaagatgtcctgcaaggcttctggctacacctttaccagttactggatgcactgggtaaaacagaggcctggacagggtctggaatggattggcgctgtttctcctggaaatagtgatactagctacaaccagaagttcaagggcaaggccacactgactgcagtcacatccaccagcactgcctacatggagttcagcagcctgacaaatgaggactctgcggtctattactgtacaagaagtcgatatggtaacaatgctttggactactggggccaagggaccacggtcaccgtctcctca

SEQ ID NO: 1166 - protein, 119 aa, Mus musculus
QVQLQQSGTVLARPGASVKMSCKASGYTFTSYWMHWVKQRPGQGLEWIGAVSPGNSDTSYNQKFKGKATLTAVTSTSTAYMEFSSLTNEDSAVYYCTRSRYGNNALDYWGQGTTVTVSS

SEQ ID NO: 1167 - DNA, 330 bp, Mus musculus
  source 1..330: mol_type = unassigned DNA
gacatcgagctcacccagtctcctgcttccttagctgtatctctggggcagagggccaccatctcatacagggccagcaaaagtgtcagtacatctggctatagttatatgcactggaaccaacagaaaccaggacagccacccagactcctcatctatcttgtatccaacctagaatctggggtccctgccaggttcagtggcagtgggtctgggacagacttcaccctcaacatccatcctgtggaggaggaggatgctgcaacctattactgtcagcacattaagggagcttacacgttcggaggggggaccaagctggaaataaaa

SEQ ID NO: 1168 - DNA, 330 bp, Mus musculus
  source 1..330: mol_type = unassigned DNA
gacatcgagctcactcagtctccagcttctttggctgtgtctctagggcagagggccaccatctcctgcagagccagcgcaagtgttgataattatggcattagttttatgaactggttccaacagaaaccaggacagccacccaaactcctcatctatgctgcatccaaccaaggatccggggtccctgccaggtttagtggcagtgggtctgggacagacttcagcctcaacatccatcctatggaggaggatgatactgcaacctattactgtcagcacattaagggagcttacacgttcggaggggggaccaagctggagctgaaa

SEQ ID NO: 1169 - DNA, 321 bp, Mus musculus
  source 1..321: mol_type = unassigned DNA
gacatcgagctcactcagtctccatcctccatgtctgtatctctgggagacacagtcaacatcacttgccgtgcaagtcagggcattagcagtaatatagtgtggttgcagcagaaaccagggaagtcatttaagggcctgatctatcatgggaccaatttggaagatggagttccatcaaggttcagtggcagtggatctggagccgattattctctcaccatcagcagcctggaatctgaggattttgcagactattactgtgtacagtattctcagtttcctcccacgttcggctcggggaccaagctggagctgaaa

SEQ ID NO: 1170 - protein, 107 aa, Mus musculus
DIELTQSPSSMSVSLGDTVNITCRASQGISSNIVWLQQKPGKSFKGLIYHGTNLEDGVPSRFSGSGSGADYSLTISSLESEDFADYYCVQYSQFPPTFGSGTKLELK

SEQ ID NO: 1171 - protein, 118 aa, Homo sapiens; identical to SEQ ID NO: 1164

SEQ ID NO: 1172 - protein, 118 aa, Mus musculus
QVQLQQSGTVLARPGASVKMSCKASGYTFTSYWMHWVKQRPGQGLEWIGAVSPGNSDTSYNQKFKGKATLTAVTSTSTAYMEFSSLTNEDSAVYYCTRSRYGNNALDYWGQGTTVTVS

SEQ ID NO: 1173 - protein, 107 aa, Homo sapiens
DIQMTQSPSSLSASVGDRVTITCRASQGISSNIVWYQQKPGKAPKGLIYHGTNLESGVPSRFSGSGSGTDYTLTISSLQPEDFATYYCVQYSQFPPTFGQGTKLEIK

SEQ ID NO: 1174 - protein, 98 aa, Homo sapiens
QVQLVQSGAEVKKPGSSVKVSCKASGGTFSSYAISWVRQAPGQGLEWMGGIIPIFGTANYAQKFQGRVTITADESTSTAYMELSSLRSEDTAVYYCAR

SEQ ID NO: 1175 - DNA, 294 bp, Homo sapiens
  source 1..294: mol_type = unassigned DNA
caggtgcagctggtgcagtctggggctgaggtgaagaagcctgggtcctcggtgaaggtctcctgcaaggcttctggaggcaccttcagcagctatgctatcagctgggtgcgacaggcccctggacaagggcttgagtggatgggagggatcatccctatctttggtacagcaaactacgcacagaagttccagggcagagtcacgattaccgcggacgaatccacgagcacagcctacatggagctgagcagcctgagatctgaggacacggccgtgtattactgtgcgaga

SEQ ID NO: 1176 - protein, 8 aa, synthetic construct
ISPMFGTP

SEQ ID NO: 1177 - protein, 8 aa, synthetic construct
IIPIFGTA

SEQ ID NO: 1178 - protein, 8 aa, synthetic construct
ISPIFGTA

SEQ ID NO: 1179 - protein, 8 aa, synthetic construct
  VARIANT 2: note = Isoleucine or Serine
  VARIANT 4: note = Isoleucine or Methionine
IXPXFGTA

SEQ ID NO: 1180 - protein, 8 aa, synthetic construct
  VARIANT 1: note = Glycine or Glutamic acid
  VARIANT 2: note = Glycine or Valine
XXTFSSYA

SEQ ID NO: 1181 - protein, 8 aa, synthetic construct
  VARIANT 2: note = Isoleucine or Serine
  VARIANT 4: note = Isoleucine or Methionine
IXPXFGTA

SEQ ID NO: 1182 - DNA, 354 bp, synthetic construct
  source 1..354: mol_type = other DNA
caggtgcagctggtgcagagcggagccgaggtgaagaagcctggagcttccgtcaaggtgtcctgcaaggccagcggctacaccttcgccagccaatggatgcactggatgcggcaggcacctggacagggcctcgaatggatcggctggatcaaccccggcaacgtgaacaccaagtacaacgagaagttcaagggcagggccaccctgaccgtggacaccagcaccaacaccgcctacatggaactgagcagcctgcggagcgaggacaccgccgtgtactactgcgccagaagcacctggtaccggccgctggactactggggccagggcaccctggtgaccgtgagcagc

SEQ ID NO: 1183 - protein, 118 aa, synthetic construct
QVQLVQSGAEVKKPGASVKVSCKASGYTFASQWMHWMRQAPGQGLEWIGWINPGNVNTKYNEKFKGRATLTVDTSTNTAYMELSSLRSEDTAVYYCARSTWYRPLDYWGQGTLVTVSS

SEQ ID NO: 1184 - DNA, 336 bp, synthetic construct
  source 1..336: mol_type = other DNA
gacatcgtgatgacccagagccccgacagcctggccgtgagcctgggcgagcgggccaccatcaactgcaagagcagccagagcatcctgtacagcagcaaccagaagaactacctggcctggtatcagcagaagcccggccagagccccaagctgctgatctactgggccagcacccgggagagcggcgtgcccgaccggtttagcggcagcggctccggcaccgacttcaccctgaccatcagcagcctgcaggccgaggacgtggccgtgtactactgccaccagtacatcagcagctacaccttcggccagggcacaaagctggaaatcaag

SEQ ID NO: 1185 - protein, 112 aa, synthetic construct
DIVMTQSPDSLAVSLGERATINCKSSQSILYSSNQKNYLAWYQQKPGQSPKLLIYWASTRESGVPDRFSGSGSGTDFTLTISSLQAEDVAVYYCHQYISSYTFGQGTKLEIK

SEQ ID NO: 1186 - DNA, 354 bp, synthetic construct
  source 1..354: mol_type = other DNA
caggtgcagctggtgcagagcggagccgaggtgaagaagcctggagcttccgtcaaggtgtcctgcaaggccagcggctacaccttcgccagcagctggatgcactggatgcggcaggcacctggacagggcctcgaatggatcggctggatcaaccccggcaacgtgaacaccaagtacaacgagaagttcaagggcagggccaccctgaccgtggacaccagcaccaacaccgcctacatggaactgagcagcctgcggagcgaggacaccgccgtgtactactgcgccagaagcacgtggtatcggccgaatgactactggggccagggcaccctggtgaccgtgagcagc

SEQ ID NO: 1187 - protein, 118 aa, synthetic construct
QVQLVQSGAEVKKPGASVKVSCKASGYTFASSWMHWMRQAPGQGLEWIGWINPGNVNTKYNEKFKGRATLTVDTSTNTAYMELSSLRSEDTAVYYCARSTWYRPNDYWGQGTLVTVSS

SEQ ID NO: 1188 - DNA, 336 bp, synthetic construct
  source 1..336: mol_type = other DNA
gacatcgtgatgacccagagccccgacagcctggccgtgagcctgggcgagcgggccaccatcaactgcaagagcagccagagcatcctgtacagcagcaaccagaagaactacctggcctggtatcagcagaagcccggccagagccccaagctgctgatctactgggccagcacccgggagagcggcgtgcccgaccggtttagcggcagcggctccggcaccgacttcaccctgaccatcagcagcctgcaggccgaggacgtggccgtgtactactgccaccagtacaaaagcagctacaccttcggccagggcacaaagctggaaatcaag

SEQ ID NO: 1189 - protein, 112 aa, synthetic construct
DIVMTQSPDSLAVSLGERATINCKSSQSILYSSNQKNYLAWYQQKPGQSPKLLIYWASTRESGVPDRFSGSGSGTDFTLTISSLQAEDVAVYYCHQYKSSYTFGQGTKLEIK

SEQ ID NO: 1190 - DNA, 354 bp, synthetic construct
  source 1..354: mol_type = other DNA
caggtgcagctggtgcagagcggagccgaggtgaagaagcctggagcttccgtcaaggtgtcctgcaaggccagcggctacaccttcgccagcagctggatgcactggatgcggcaggcacctggacagggcctcgaatggatcggctggatcaaccccggcaacgtgaacaccaagtacaacgagaagttcaagggcagggccaccctgaccgtggacaccagcaccaacaccgcctacatggaactgagcagcctgcggagcgaggacaccgccgtgtactactgcgccagaaccacccgttatcggcccctggactactggggccagggcaccctggtgaccgtgagcagc

SEQ ID NO: 1191 - protein, 118 aa, synthetic construct
QVQLVQSGAEVKKPGASVKVSCKASGYTFASSWMHWMRQAPGQGLEWIGWINPGNVNTKYNEKFKGRATLTVDTSTNTAYMELSSLRSEDTAVYYCARTTRYRPLDYWGQGTLVTVSS

SEQ ID NO: 1192 - DNA, 336 bp, synthetic construct
  source 1..336: mol_type = other DNA
gacatcgtgatgacccagagccccgacagcctggccgtgagcctgggcgagcgggccaccatcaactgcaagagcagccagagcatcctgtacagcagcaaccagaagaactacctggcctggtatcagcagaagcccggccagagccccaagctgctgatctactgggccagcacccgggagagcggcgtgcccgaccggtttagcggcagcggctccggcaccgacttcaccctgaccatcagcagcctgcaggccgaggacgtggccgtgtactactgccaccagtaccgtagcagctacaccttcggccagggcacaaagctggaaatcaag

SEQ ID NO: 1193 - protein, 112 aa, synthetic construct
DIVMTQSPDSLAVSLGERATINCKSSQSILYSSNQKNYLAWYQQKPGQSPKLLIYWASTRESGVPDRFSGSGSGTDFTLTISSLQAEDVAVYYCHQYRSSYTFGQGTKLEIK

SEQ ID NO: 1194 - DNA, 354 bp, synthetic construct
  source 1..354: mol_type = other DNA
caggtgcagctggtgcagagcggagccgaggtgaagaagcctggagcttccgtcaaggtgtcctgcaaggccagcggctacaccttcgccagccaatatatgcactggatgcggcaggcacctggacagggcctcgaatggatcggctggatcaaccccggcaacgtgaacaccaagtacaacgagaagttcaagggcagggccaccctgaccgtggacaccagcaccaacaccgcctacatggaactgagcagcctgcggagcgaggacaccgccgtgtactactgcgccagactgacctattatcggccgccggactactggggccagggcaccctggtgaccgtgagcagc

SEQ ID NO: 1195 - protein, 118 aa, synthetic construct
QVQLVQSGAEVKKPGASVKVSCKASGYTFASQYMHWMRQAPGQGLEWIGWINPGNVNTKYNEKFKGRATLTVDTSTNTAYMELSSLRSEDTAVYYCARLTYYRPPDYWGQGTLVTVSS

SEQ ID NO: 1196 - DNA, 336 bp, synthetic construct
  source 1..336: mol_type = other DNA
gacatcgtgatgacccagagccccgacagcctggccgtgagcctgggcgagcgggccaccatcaactgcaagagcagccagagcatcctgtacagcagcaaccagaagaactacctggcctggtatcagcagaagcccggccagagccccaagctgctgatctactgggccagcacccgggagagcggcgtgcccgaccggtttagcggcagcggctccggcaccgacttcaccctgaccatcagcagcctgcaggccgaggacgtggccgtgtactactgccaccagtactatagcagctacaccttcggccagggcacaaagctggaaatcaag

SEQ ID NO: 1197 - protein, 112 aa, synthetic construct
DIVMTQSPDSLAVSLGERATINCKSSQSILYSSNQKNYLAWYQQKPGQSPKLLIYWASTRESGVPDRFSGSGSGTDFTLTISSLQAEDVAVYYCHQYYSSYTFGQGTKLEIK

SEQ ID NO: 1198 - DNA, 354 bp, synthetic construct
  source 1..354: mol_type = other DNA
caggtgcagctggtgcagagcggagccgaggtgaagaagcctggagcttccgtcaaggtgtcctgcaaggccagcggctacaccttcgccagcgcgtggatgcactggatgcggcaggcacctggacagggcctcgaatggatcggctggatcaaccccggcaacgtgaacaccaagtacaacgagaagttcaagggcagggccaccctgaccgtggacaccagcaccaacaccgcctacatggaactgagcagcctgcggagcgaggacaccgccgtgtactactgcgccagaagcacgtattaccggccgctggactactggggccagggcaccctggtgaccgtgagcagc

SEQ ID NO: 1199 - protein, 118 aa, synthetic construct
QVQLVQSGAEVKKPGASVKVSCKASGYTFASAWMHWMRQAPGQGLEWIGWINPGNVNTKYNEKFKGRATLTVDTSTNTAYMELSSLRSEDTAVYYCARSTYYRPLDYWGQGTLVTVSS

SEQ ID NO: 1200 - DNA, 336 bp, synthetic construct
  source 1..336: mol_type = other DNA
gacatcgtgatgacccagagccccgacagcctggccgtgagcctgggcgagcgggccaccatcaactgcaagagcagccagagcatcctgtacagcagcaaccagaagaactacctggcctggtatcagcagaagcccggccagagccccaagctgctgatctactgggccagcacccgggagagcggcgtgcccgaccggtttagcggcagcggctccggcaccgacttcaccctgaccatcagcagcctgcaggccgaggacgtggccgtgtactactgccaccagtacatgagcagctacaccttcggccagggcacaaagctggaaatcaag

SEQ ID NO: 1201 - protein, 112 aa, synthetic construct
DIVMTQSPDSLAVSLGERATINCKSSQSILYSSNQKNYLAWYQQKPGQSPKLLIYWASTRESGVPDRFSGSGSGTDFTLTISSLQAEDVAVYYCHQYMSSYTFGQGTKLEIK

SEQ ID NO: 1202 - protein, 8 aa, synthetic construct
GYTFASYY

SEQ ID NO: 1203 - protein, 8 aa, synthetic construct
GYTFASQW

SEQ ID NO: 1204 - protein, 8 aa, synthetic construct
GYTFASSW

SEQ ID NO: 1205 - protein, 8 aa, synthetic construct
GYTFASQY

SEQ ID NO: 1206 - protein, 8 aa, synthetic construct
GYTFASAW

SEQ ID NO: 1207 - protein, 12 aa, synthetic construct
QSILYSSNQKNY

SEQ ID NO: 1208 - protein, 8 aa, synthetic construct
INPGNVNT

SEQ ID NO: 1209 - protein, 6 aa, synthetic construct
WASTRE

SEQ ID NO: 1210 - protein, 9 aa, synthetic construct
STYYRPLDY

SEQ ID NO: 1211 - protein, 9 aa, synthetic construct
STWYRPLDY

SEQ ID NO: 1212 - protein, 9 aa, synthetic construct
STWYRPNDY

SEQ ID NO: 1213 - protein, 9 aa, synthetic construct
TTRYRPLDY

SEQ ID NO: 1214 - protein, 9 aa, synthetic construct
LTYYRPPDY

SEQ ID NO: 1215 - protein, 8 aa, synthetic construct
HQYLSSYT

SEQ ID NO: 1216 - protein, 8 aa, synthetic construct
HQYISSYT

SEQ ID NO: 1217 - protein, 8 aa, synthetic construct
HQYKSSYT

SEQ ID NO: 1218 - protein, 8 aa, synthetic construct
HQYRSSYT

SEQ ID NO: 1219 - protein, 8 aa, synthetic construct
HQYYSSYT

SEQ ID NO: 1220 - protein, 8 aa, synthetic construct
HQYMSSYT

SEQ ID NO: 1221 - DNA, 27 bp, synthetic construct
  source 1..27: mol_type = other DNA
tctgagtaggtgtcattctattctggg

SEQ ID NO: 1222 - DNA, 25 bp, synthetic construct
  source 1..25: mol_type = other DNA
cactaggggttcctagatctctccc

SEQ ID NO: 1223 - DNA, 26 bp, synthetic construct
  source 1..26: mol_type = other DNA
tcttcccaatcctcccccttgctgtc

SEQ ID NO: 1224 - protein, 123 aa, synthetic construct
TRVLSQVQLVQSGAEVKKPGASVKVSCKASGYTFSGYSTHWLRQVPGQGLEWIGWDNPSSGDTTYAENFRGRVTLTRDTSITTDYLEVRGLRSDDTAVYYCARGGDDYSFDHWGQGTLVTVSS

SEQ ID NO: 1225 - DNA, 354 bp, synthetic construct
  source 1..354: mol_type = other DNA
  misc_difference 62: note = a, c, t, or g
  misc_difference 90: note = a, c, t, or g
  misc_difference 120: note = a, c, t, or g
  misc_difference 182: note = a, c, t, or g
  misc_difference 190..192: note = a, c, t, or g
  misc_difference 208: note = a, c, t, or g
  misc_difference 256: note = a, c, t, or g
  misc_difference 279: note = a, c, t, or g
  misc_difference 288: note = a, c, t, or g
  misc_difference 297: note = a, c, t, or g
caggtgcagctggtgcagtctggggctgaggtgaagaagcctggggcctcagtgaaagtctnctgcaaggcttctggatacaccttcagnggctactctacacactggctgcgacaggtncctggacagggacttgagtggattggatgggacaaccctagtagtggtgacacgacctatgnagagaatnnncggggcagggtcaccntgaccagggacacgtccatcaccacagattacttggaagtgaggggtntaagatctgacgacacggccgtntattattgngccagaggnggagatgactacagctttgaccattggggtcagggcaccctggtcaccgtctcctca

SEQ ID NO: 1226 - protein, 105 aa, synthetic construct
SSELTQDPAVSVALGQTVRITCRGDSLRSYYASWYQQKPGQAPVLVIYGENNRPSGIPDRFSGSSSGDTASLTITGAQAEDEADYYCNSRDSSDHLLLFGQGTKL

SEQ ID NO: 1227 - DNA, 327 bp, synthetic construct
  source 1..327: mol_type = other DNA
tcttctgagctgactcaggacccagctgtgtctgtggccttgggacagacagtcaggatcacatgccgaggagacagcctcagaagttattatgcaagctggtaccaacagaagccaggacaggcccctgtacttgtcatctatggtgaaaacaaccgaccctcagggatcccagaccgattctctggctccagctcaggagacacagcttccttgaccatcactggggctcaggcggaagatgaggctgactattactgtaactcccgggacagcagtgatcaccttctcctattcggtggagggaccaagttgaccgtcctaggt

SEQ ID NO: 1228 - protein, 330 aa, Homo sapiens
ASTKGPSVFPLAPSSKSTSGGTAALGCLVKDYFPEPVTVSWNSGALTSGVHTFPAVLQSSGLYSLSSVVTVPSSSLGTQTYICNVNHKPSNTKVDKKAEPKSCDKTHTCPPCPAPELLGGPSVFLFPPKPKDTLMISRTPEVTCVVVDVSHEDPEVKFNWYVDGVEVHNAKTKPREEQYNSTYRVVSVLTVLHQDWLNGKEYKCKVSNKALPAPIEKTISKAKGQPREPQVYTLPPSRDELTKNQVSLTCLVKGFYPSDIAVEWESNGQPENNYKTTPPVLDSDGSFFLYSKLTVDKSRWQQGNVFSCSVMHEALHNHYTQKSLSLSPGK

SEQ ID NO: 1229 - DNA, 992 bp, Homo sapiens
  source 1..992: mol_type = unassigned DNA
ctagcaccaagggcccatcggtcttccccctggcaccctcctccaagagcacctctgggggcacagcggccctgggctgcctggtcaaggactacttccccgaaccggtgacggtgtcgtggaactcaggcgccctgaccagcggcgtgcacaccttcccggctgtcctacagtcctcaggactctactccctcagcagcgtggtgaccgtgccctccagcagcttgggcacccagacctacatctgcaacgtgaatcacaagcccagcaacaccaaggtggacaagaaagcagagcccaaatcttgtgacaaaactcacacatgcccaccgtgcccagcacctgaactcctggggggaccgtcagtcttcctcttccccccaaaacccaaggacaccctcatgatctcccggacccctgaggtcacatgcgtggtggtggacgtgagccacgaagaccctgaggtcaagttcaactggtacgtggacggcgtggaggtgcataatgccaagacaaagccgcgggaggagcagtacaacagcacgtaccgtgtggtcagcgtcctcaccgtcctgcaccaggactggctgaatggcaaggagtacaagtgcaaggtctccaacaaagccctcccagcccccatcgagaaaaccatctccaaagccaaagggcagccccgagaaccacaggtgtacaccctgcccccatcccgggatgagctgaccaagaaccaggtcagcctgacctgcctggtcaaaggcttctatcccagcgacatcgccgtggagtgggagagcaatgggcagccggagaacaactacaagaccacgcctcccgtgctggactccgacggctccttcttcctctacagcaagctcaccgtggacaagagcaggtggcagcaggggaacgtcttctcatgctccgtgatgcatgaggctctgcacaaccactacacgcagaagagcctctccctgtctccgggtaaatga

SEQ ID NO: 1230 - protein, 330 aa, synthetic construct
ASTKGPSVFPLAPSSKSTSGGTAALGCLVKDYFPEPVTVSWNSGALTSGVHTFPAVLQSSGLYSLSSVVTVPSSSLGTQTYICNVNHKPSNTKVDKKAEPKSCDKTHTCPPCPAPEAAGGPSVFLFPPKPKDTLMISRTPEVTCVVVDVSHEDPEVKFNWYVDGVEVHNAKTKPREEQYNSTYRVVSVLTVLHQDWLNGKEYKCKVSNKALPAPIEKTISKAKGQPREPQVYTLPPSRDELTKNQVSLTCLVKGFYPSDIAVEWESNGQPENNYKTTPPVLDSDGSFFLYSKLTVDKSRWQQGNVFSCSVMHEALHNHYTQKSLSLSPGK

SEQ ID NO: 1231 - DNA, 992 bp, synthetic construct
  source 1..992: mol_type = other DNA
ctagcaccaagggcccatcggtcttccccctggcaccctcctccaagagcacctctgggggcacagcggccctgggctgcctggtcaaggactacttccccgaaccggtgacggtgtcgtggaactcaggcgccctgaccagcggcgtgcacaccttcccggctgtcctacagtcctcaggactctactccctcagcagcgtggtgaccgtgccctccagcagcttgggcacccagacctacatctgcaacgtgaatcacaagcccagcaacaccaaggtggacaagaaagcagagcccaaatcttgtgacaaaactcacacatgcccaccgtgcccagcacctgaagccgccgggggaccgtcagtcttcctcttccccccaaaacccaaggacaccctcatgatctcccggacccctgaggtcacatgcgtggtggtggacgtgagccacgaagaccctgaggtcaagttcaactggtacgtggacggcgtggaggtgcataatgccaagacaaagccgcgggaggagcagtacaacagcacgtaccgtgtggtcagcgtcctcaccgtcctgcaccaggactggctgaatggcaaggagtacaagtgcaaggtctccaacaaagccctcccagcccccatcgagaaaaccatctccaaagccaaagggcagccccgagaaccacaggtgtacaccctgcccccatcccgggatgagctgaccaagaaccaggtcagcctgacctgcctggtcaaaggcttctatcccagcgacatcgccgtggagtgggagagcaatgggcagccggagaacaactacaagaccacgcctcccgtgctggactccgacggctccttcttcctctacagcaagctcaccgtggacaagagcaggtggcagcaggggaacgtcttctcatgctccgtgatgcatgaggctctgcacaaccactacacgcagaagagcctctccctgtctccgggtaaatga

SEQ ID NO: 1232 - protein, 97 aa, Homo sapiens
ASTKGPSVFPLAPSSKSTSGGTAALGCLVKDYFPEPVTVSWNSGALTSGVHTFPAVLQSSGLYSLSSVVTVPSSSLGTQTYICNVNHKPSNTKVDKK

SEQ ID NO: 1233 - DNA, 290 bp, Homo sapiens
  source 1..290: mol_type = unassigned DNA
ctagcaccaagggcccatcggtcttccccctggcaccctcctccaagagcacctctgggggcacagcggccctgggctgcctggtcaaggactacttccccgaaccggtgacggtgtcgtggaactcaggcgccctgaccagcggcgtgcacaccttcccggctgtcctacagtcctcaggactctactccctcagcagcgtggtgaccgtgccctccagcagcttgggcacccagacctacatctgcaacgtgaatcacaagcccagcaacaccaaggtggacaagaaa

SEQ ID NO: 1234 - protein, 110 aa, Homo sapiens
APELLGGPSVFLFPPKPKDTLMISRTPEVTCVVVDVSHEDPEVKFNWYVDGVEVHNAKTKPREEQYNSTYRVVSVLTVLHQDWLNGKEYKCKVSNKALPAPIEKTISKAK

SEQ ID NO: 1235 - DNA, 330 bp, Homo sapiens
  source 1..330: mol_type = unassigned DNA
gcacctgaactcctggggggaccgtcagtcttcctcttccccccaaaacccaaggacaccctcatgatctcccggacccctgaggtcacatgcgtggtggtggacgtgagccacgaagaccctgaggtcaagttcaactggtacgtggacggcgtggaggtgcataatgccaagacaaagccgcgggaggagcagtacaacagcacgtaccgtgtggtcagcgtcctcaccgtcctgcaccaggactggctgaatggcaaggagtacaagtgcaaggtctccaacaaagccctcccagcccccatcgagaaaaccatctccaaagccaaa

SEQ ID NO: 1236 - protein, 110 aa, synthetic construct
APEAAGGPSVFLFPPKPKDTLMISRTPEVTCVVVDVSHEDPEVKFNWYVDGVEVHNAKTKPREEQYNSTYRVVSVLTVLHQDWLNGKEYKCKVSNKALPAPIEKTISKAK

SEQ ID NO: 1237 - DNA, 330 bp, synthetic construct
  source 1..330: mol_type = other DNA
gcacctgaagccgccgggggaccgtcagtcttcctcttccccccaaaacccaaggacaccctcatgatctcccggacccctgaggtcacatgcgtggtggtggacgtgagccacgaagaccctgaggtcaagttcaactggtacgtggacggcgtggaggtgcataatgccaagacaaagccgcgggaggagcagtacaacagcacgtaccgtgtggtcagcgtcctcaccgtcctgcaccaggactggctgaatggcaaggagtacaagtgcaaggtctccaacaaagccctcccagcccccatcgagaaaaccatctccaaagccaaa

SEQ ID NO: 1238 - protein, 107 aa, Homo sapiens
GQPREPQVYTLPPSRDELTKNQVSLTCLVKGFYPSDIAVEWESNGQPENNYKTTPPVLDSDGSFFLYSKLTVDKSRWQQGNVFSCSVMHEALHNHYTQKSLSLSPGK

SEQ ID NO: 1239 - DNA, 324 bp, Homo sapiens
  source 1..324: mol_type = unassigned DNA
gggcagccccgagaaccacaggtgtacaccctgcccccatcccgggatgagctgaccaagaaccaggtcagcctgacctgcctggtcaaaggcttctatcccagcgacatcgccgtggagtgggagagcaatgggcagccggagaacaactacaagaccacgcctcccgtgctggactccgacggctccttcttcctctacagcaagctcaccgtggacaagagcaggtggcagcaggggaacgtcttctcatgctccgtgatgcatgaggctctgcacaaccactacacgcagaagagcctctccctgtctccgggtaaatga

SEQ ID NO: 1240 - protein, 16 aa, Homo sapiens
AEPKSCDKTHTCPPCP

SEQ ID NO: 1241 - DNA, 48 bp, Homo sapiens
  source 1..48: mol_type = unassigned DNA
gcagagcccaaatcttgtgacaaaactcacacatgcccaccgtgccca

SEQ ID NO: 1242 - protein, 453 aa, Homo sapiens
TRVLSQVQLVQSGAEVKKPGASVKVSCKASGYTFSGYSTHWLRQVPGQGLEWIGWDNPSSGDTTYAENFRGRVTLTRDTSITTDYLEVRGLRSDDTAVYYCARGGDDYSFDHWGQGTLVTVSSASTKGPSVFPLAPSSKSTSGGTAALGCLVKDYFPEPVTVSWNSGALTSGVHTFPAVLQSSGLYSLSSVVTVPSSSLGTQTYICNVNHKPSNTKVDKKAEPKSCDKTHTCPPCPAPELLGGPSVFLFPPKPKDTLMISRTPEVTCVVVDVSHEDPEVKFNWYVDGVEVHNAKTKPREEQYNSTYRVVSVLTVLHQDWLNGKEYKCKVSNKALPAPIEKTISKAKGQPREPQVYTLPPSRDELTKNQVSLTCLVKGFYPSDIAVEWESNGQPENNYKTTPPVLDSDGSFFLYSKLTVDKSRWQQGNVFSCSVMHEALHNHYTQKSLSLSPGK

SEQ ID NO: 1243 - protein, 453 aa, synthetic construct
TRVLSQVQLVQSGAEVKKPGASVKVSCKASGYTFSGYSTHWLRQVPGQGLEWIGWDNPSSGDTTYAENFRGRVTLTRDTSITTDYLEVRGLRSDDTAVYYCARGGDDYSFDHWGQGTLVTVSSASTKGPSVFPLAPSSKSTSGGTAALGCLVKDYFPEPVTVSWNSGALTSGVHTFPAVLQSSGLYSLSSVVTVPSSSLGTQTYICNVNHKPSNTKVDKKAEPKSCDKTHTCPPCPAPEAAGGPSVFLFPPKPKDTLMISRTPEVTCVVVDVSHEDPEVKFNWYVDGVEVHNAKTKPREEQYNSTYRVVSVLTVLHQDWLNGKEYKCKVSNKALPAPIEKTISKAKGQPREPQVYTLPPSRDELTKNQVSLTCLVKGFYPSDIAVEWESNGQPENNYKTTPPVLDSDGSFFLYSKLTVDKSRWQQGNVFSCSVMHEALHNHYTQKSLSLSPGK

SEQ ID NO: 1244 - protein, 5 aa, synthetic construct
GYSTH

SEQ ID NO: 1245 - protein, 17 aa, synthetic construct
WDNPSSGDTTYAENFRG

SEQ ID NO: 1246 - protein, 9 aa, synthetic construct
GGDDYSFDH

SEQ ID NO: 1247 - protein, 11 aa, synthetic construct
RGDSLRSYYAS

SEQ ID NO: 1248 - protein, 7 aa, synthetic construct
GENNRPS

SEQ ID NO: 1249 - protein, 11 aa, synthetic construct
NSRDSSDHLLL

SEQ ID NO: 1250 - protein, 121 aa, Homo sapiens; identical to SEQ ID NO: 845

SEQ ID NO: 1251 - protein, 113 aa, Homo sapiens; identical to SEQ ID NO: 846

SEQ ID NO: 1252 - protein, 119 aa, Homo sapiens; identical to SEQ ID NO: 847

SEQ ID NO: 1253 - protein, 119 aa, Homo sapiens; identical to SEQ ID NO: 848

SEQ ID NO: 1254 - protein, 119 aa, Homo sapiens; identical to SEQ ID NO: 848

SEQ ID NO: 1255 - protein, 119 aa, Homo sapiens; identical to SEQ ID NO: 850

SEQ ID NO: 1256 - protein, 119 aa, Homo sapiens; identical to SEQ ID NO: 851

SEQ ID NO: 1257 - protein, 118 aa, Homo sapiens; identical to SEQ ID NO: 852

SEQ ID NO: 1258 - protein, 119 aa, Homo sapiens; identical to SEQ ID NO: 853

SEQ ID NO: 1259 - protein, 119 aa, Homo sapiens; identical to SEQ ID NO: 848

SEQ ID NO: 1260 - protein, 119 aa, Homo sapiens; identical to SEQ ID NO: 855

SEQ ID NO: 1261 - protein, 116 aa, Homo sapiens; identical to SEQ ID NO: 856

SEQ ID NO: 1262 - protein, 119 aa, Homo sapiens; identical to SEQ ID NO: 857

SEQ ID NO: 1263 - protein, 122 aa, Homo sapiens; identical to SEQ ID NO: 858

SEQ ID NO: 1264 - protein, 118 aa, Homo sapiens; identical to SEQ ID NO: 859

SEQ ID NO: 1265 - protein, 118 aa, Homo sapiens; identical to SEQ ID NO: 859

SEQ ID NO: 1266 - protein, 116 aa, Homo sapiens; identical to SEQ ID NO: 861

SEQ ID NO: 1267 - protein, 118 aa, Homo sapiens; identical to SEQ ID NO: 862

SEQ ID NO: 1268 - protein, 122 aa, Homo sapiens; identical to SEQ ID NO: 863

SEQ ID NO: 1269 - protein, 119 aa, Homo sapiens; identical to SEQ ID NO: 864

SEQ ID NO: 1270 - protein, 119 aa, Homo sapiens; identical to SEQ ID NO: 851

SEQ ID NO: 1271 - protein, 121 aa, Homo sapiens; identical to SEQ ID NO: 866

SEQ ID NO: 1272 - protein, 118 aa, Homo sapiens; identical to SEQ ID NO: 867

SEQ ID NO: 1273 - protein, 112 aa, Homo sapiens; identical to SEQ ID NO: 868

SEQ ID NO: 1274 - protein, 111 aa, Homo sapiens; identical to SEQ ID NO: 869

SEQ ID NO: 1275 - protein, 112 aa, Homo sapiens; identical to SEQ ID NO: 870

SEQ ID NO: 1276 - protein, 112 aa, Homo sapiens; identical to SEQ ID NO: 871

SEQ ID NO: 1277 - protein, 112 aa, Homo sapiens; identical to SEQ ID NO: 872

SEQ ID NO: 1278 - protein, 111 aa, Homo sapiens; identical to SEQ ID NO: 873

SEQ ID NO: 1279 - protein, 111 aa, Homo sapiens; identical to SEQ ID NO: 874

SEQ ID NO: 1280 - protein, 111 aa, Homo sapiens; identical to SEQ ID NO: 875

SEQ ID NO: 1281 - protein, 112 aa, Homo sapiens; identical to SEQ ID NO: 876

SEQ ID NO: 1282 - protein, 112 aa, Homo sapiens; identical to SEQ ID NO: 877

SEQ ID NO: 1283 - protein, 111 aa, Homo sapiens; identical to SEQ ID NO: 878

SEQ ID NO: 1284 - protein, 111 aa, Homo sapiens; identical to SEQ ID NO: 879

SEQ ID NO: 1285 - protein, 112 aa, Homo sapiens; identical to SEQ ID NO: 880

SEQ ID NO: 1286 - protein, 112 aa, Homo sapiens; identical to SEQ ID NO: 881
  VARIANT 83: note = Any naturally occurring amino acid

SEQ ID NO: 1287 - protein, 110 aa, Homo sapiens; identical to SEQ ID NO: 882

SEQ ID NO: 1288 - protein, 112 aa, Homo sapiens; identical to SEQ ID NO: 883

SEQ ID NO: 1289 - protein, 112 aa, Homo sapiens; identical to SEQ ID NO: 883

SEQ ID NO: 1290 - protein, 111 aa, Homo sapiens; identical to SEQ ID NO: 885

SEQ ID NO: 1291 - protein, 112 aa, Homo sapiens; identical to SEQ ID NO: 886

SEQ ID NO: 1292 - protein, 109 aa, Homo sapiens; identical to SEQ ID NO: 887

SEQ ID NO: 1293 - protein, 109 aa, Homo sapiens; identical to SEQ ID NO: 888

SEQ ID NO: 1294 - protein, 458 aa, Homo sapiens; identical to SEQ ID NO: 889

SEQ ID NO: 1295 - protein, 437 aa, Mus musculus; identical to SEQ ID NO: 890

SEQ ID NO: 1296 - DNA, 38 bp, synthetic construct; identical to SEQ ID NO: 891
  source 1..38: mol_type = other DNA

SEQ ID NO: 1297 - DNA, 32 bp, synthetic construct; identical to SEQ ID NO: 892
  source 1..32: mol_type = other DNA

SEQ ID NO: 1298 - DNA, 35 bp, synthetic construct; identical to SEQ ID NO: 893
  source 1..35: mol_type = other DNA

SEQ ID NO: 1299 - DNA, 31 bp, synthetic construct; identical to SEQ ID NO: 894
  source 1..31: mol_type = other DNA

SEQ ID NO: 1300 - DNA, 41 bp, synthetic construct; identical to SEQ ID NO: 895
  source 1..41: mol_type = other DNA

SEQ ID NO: 1301 - DNA, 32 bp, synthetic construct; identical to SEQ ID NO: 896
  source 1..32: mol_type = other DNA

SEQ ID NO: 1302 - DNA, 35 bp, synthetic construct; identical to SEQ ID NO: 897
  source 1..35: mol_type = other DNA

SEQ ID NO: 1303 - DNA, 26 bp, synthetic construct
  source 1..26: mol_type = other DNA
atagcacctaggacggtcagcttggt

SEQ ID NO: 1304 - protein, 5 aa, synthetic construct
SYAMS

SEQ ID NO: 1305-1306 - skipped (2 entries)

SEQ ID NO: 1307 - protein, 17 aa, synthetic construct
  VARIANT 4..5: note = Any naturally occurring amino acid
  VARIANT 8: note = Any naturally occurring amino acid
  VARIANT 10..11: note = Any naturally occurring amino acid
AISXXGGXTXXADSVKG

SEQ ID NO: 1308 - protein, 17 aa, synthetic construct
AISGSGGSTTTADSVKG

SEQ ID NO: 1309 - protein, 13 aa, synthetic construct
  VARIANT 9: note = Any naturally occurring amino acid
NGNYRGSLXAFDI

SEQ ID NO: 1310 - protein, 14 aa, synthetic construct
TGSSSNIGAGYDVH

SEQ ID NO: 1311 - protein, 7 aa, synthetic construct
GNNNRPS

SEQ ID NO: 1312 - protein, 12 aa, synthetic construct
QSYDSSLSAWVV

SEQ ID NO: 1313 - protein, 6 aa, synthetic construct
EEDLPE

SEQ ID NO: 1314 - protein, 10 aa, synthetic construct
NGNYRGAFDI

SEQ ID NO: 1315 - DNA, 354 bp, synthetic construct
  source 1..354: mol_type = other DNA
caggtgcagctggtgcagagcggcgcggaagtgaaaaaaccgggcgcgagcgtgaaagtgagctgcaaagcgagcggctatacctttgcgagcgcgtggatgcattggatgcgccaggcgccgggccagggcctggaatggattggctggattaacccgggcaacgtgaacaccaaatataacgaaaaatttaaaggccgcgcgaccctgaccgtggataccagcaccaacaccgcgtatatggaactgagcagcctgcgcagcgaagataccgcggtgtattattgcgcgcgcagcacctattatcgcccgctggattattggggccagggcaccctggtgaccgtgagcagc

SEQ ID NO: 1316 - protein, 118 aa, synthetic construct; identical to SEQ ID NO: 1199

SEQ ID NO: 1317 - DNA, 336 bp, synthetic construct
  source 1..336: mol_type = other DNA
gatattgtgatgacccagagcccggatagcctggcggtgagcctgggcgaacgcgcgaccattaactgcaaaagcagccagagcattctgtatagcagcaaccagaaaaactatctggcgtggtatcagcagaaaccgggccagagcccgaaactgctgatttattgggcgagcacccgcgaaagcggcgtgccggatcgctttagcggcagcggcagcggcaccgattttaccctgaccattagcagcctgcaggcggaagatgtggcggtgtattattgccatcagtatatgagcagctatacctttggccagggcaccaaactggaaattaaa

SEQ ID NO: 1318 - protein, 112 aa, synthetic construct; identical to SEQ ID NO: 1201

SEQ ID NO: 1319 - DNA, 981 bp, synthetic construct
  source 1..981: mol_type = other DNA
gcgagcaccaaaggcccgagcgtgtttccgctggcgccgtgcagccgcagcaccagcgaaagcaccgcggcgctgggctgcctggtgaaagattattttccggaaccggtgaccgtgagctggaacagcggcgcgctgaccagcggcgtgcatacctttccggcggtgctgcagagcagcggcctgtatagcctgagcagcgtggtgaccgtgccgagcagcagcctgggcaccaaaacctatacctgcaacgtggatcataaaccgagcaacaccaaagtggataaacgcgtggaaagcaaatatggcccgccgtgcccgagctgcccggcgccggaatttctgggcggcccgagcgtgtttctgtttccgccgaaaccgaaagataccctgatgattagccgcaccccggaagtgacctgcgtggtggtggatgtgagccaggaagatccggaagtgcagtttaactggtatgtggatggcgtggaagtgcataacgcgaaaaccaaaccgcgcgaagaacagtttaacagcacctatcgcgtggtgagcgtgctgaccgtgctgcatcaggattggctgaacggcaaagaatataaatgcaaagtgagcaacaaaggcctgccgagcagcattgaaaaaaccattagcaaagcgaaaggccagccgcgcgaaccgcaggtgtataccctgccgccgagcccggaagaaatgaccaaaaaccaggtgagcctgacctgcctggtgaaaggcttttatccgagcgatattgcggtggaatgggaaagcaacggccagccggaaaacaactataaaaccaccccgccggtgctggatagcgatggcagcttttttctgtatagccgcctgaccgtggataaaagccgctggcaggaaggcaacgtgtttagctgcagcgtgatgcatgaagcgctgcataaccattatacccagaaaagcctgagcctgagcctgggcaaa

SEQ ID NO: 1320 - protein, 327 aa, synthetic construct
ASTKGPSVFPLAPCSRSTSESTAALGCLVKDYFPEPVTVSWNSGALTSGVHTFPAVLQSSGLYSLSSVVTVPSSSLGTKTYTCNVDHKPSNTKVDKRVESKYGPPCPSCPAPEFLGGPSVFLFPPKPKDTLMISRTPEVTCVVVDVSQEDPEVQFNWYVDGVEVHNAKTKPREEQFNSTYRVVSVLTVLHQDWLNGKEYKCKVSNKGLPSSIEKTISKAKGQPREPQVYTLPPSPEEMTKNQVSLTCLVKGFYPSDIAVEWESNGQPENNYKTTPPVLDSDGSFFLYSRLTVDKSRWQEGNVFSCSVMHEALHNHYTQKSLSLSLGK

SEQ ID NO: 1321 - DNA, 975 bp, synthetic construct
  source 1..975: mol_type = other DNA
accaaaggcccgagcgtgtttccgctggcgccgtgcagccgcagcaccagcgaaagcaccgcggcgctgggctgcctggtgaaagattattttccggaaccggtgaccgtgagctggaacagcggcgcgctgaccagcggcgtgcatacctttccggcggtgctgcagagcagcggcctgtatagcctgagcagcgtggtgaccgtgccgagcagcagcctgggcaccaaaacctatacctgcaacgtggatcataaaccgagcaacaccaaagtggataaacgcgtggaaagcaaatatggcccgccgtgcccgccgtgcccggcgccggaatttctgggcggcccgagcgtgtttctgtttccgccgaaaccgaaagataccctgatgattagccgcaccccggaagtgacctgcgtggtggtggatgtgagccaggaagatccggaagtgcagtttaactggtatgtggatggcgtggaagtgcataacgcgaaaaccaaaccgcgcgaagaacagtttaacagcacctatcgcgtggtgagcgtgctgaccgtgctgcatcaggattggctgaacggcaaagaatataaatgcaaagtgagcaacaaaggcctgccgagcagcattgaaaaaaccattagcaaagcgaaaggccagccgcgcgaaccgcaggtgtataccctgccgccgagcccggaagaaatgaccaaaaaccaggtgagcctgacctgcctggtgaaaggcttttatccgagcgatattgcggtggaatgggaaagcaacggccagccggaaaacaactataaaaccaccccgccggtgctggatagcgatggcagcttttttctgtatagcaaactgaccgtggataaaagccgctggcaggaaggcaacgtgtttagctgcagcgtgatgcatgaagcgctgcataaccattatacccagaaaagcctgagcctgagcctgggcaaa

SEQ ID NO: 1322 - protein, 325 aa, synthetic construct
TKGPSVFPLAPCSRSTSESTAALGCLVKDYFPEPVTVSWNSGALTSGVHTFPAVLQSSGLYSLSSVVTVPSSSLGTKTYTCNVDHKPSNTKVDKRVESKYGPPCPPCPAPEFLGGPSVFLFPPKPKDTLMISRTPEVTCVVVDVSQEDPEVQFNWYVDGVEVHNAKTKPREEQFNSTYRVVSVLTVLHQDWLNGKEYKCKVSNKGLPSSIEKTISKAKGQPREPQVYTLPPSPEEMTKNQVSLTCLVKGFYPSDIAVEWESNGQPENNYKTTPPVLDSDGSFFLYSKLTVDKSRWQEGNVFSCSVMHEALHNHYTQKSLSLSLGK

SEQ ID NO: 1323 - protein, 8 aa, synthetic construct
GYTFASAW

SEQ ID NO: 1324 - protein, 12 aa, synthetic construct
QSILYSSNQKNY

SEQ ID NO: 1325 - protein, 8 aa, synthetic construct
INPGNVNT

SEQ ID NO: 1326 - protein, 6 aa, synthetic construct
WASTRE

SEQ ID NO: 1327 - protein, 9 aa, synthetic construct
STYYRPLDY

SEQ ID NO: 1328 - protein, 8 aa, synthetic construct
HQYMSSYT

SEQ ID NO: 1329 - DNA, 354 bp, synthetic construct; identical to SEQ ID NO: 1182
  source 1..354: mol_type = other DNA

SEQ ID NO: 1330 - protein, 118 aa, synthetic construct; identical to SEQ ID NO: 1183

SEQ ID NO: 1331 - DNA, 336 bp, synthetic construct; identical to SEQ ID NO: 1184
  source 1..336: mol_type = other DNA

SEQ ID NO: 1332 - protein, 112 aa, synthetic construct; identical to SEQ ID NO: 1185

SEQ ID NO: 1333 - DNA, 354 bp, synthetic construct; identical to SEQ ID NO: 1186
  source 1..354: mol_type = other DNA

SEQ ID NO: 1334 - protein, 118 aa, synthetic construct; identical to SEQ ID NO: 1187

SEQ ID NO: 1335 - DNA, 336 bp, synthetic construct; identical to SEQ ID NO: 1188
  source 1..336: mol_type = other DNA

SEQ ID NO: 1336 - protein, 112 aa, synthetic construct; identical to SEQ ID NO: 1189

SEQ ID NO: 1337 - DNA, 354 bp, synthetic construct; identical to SEQ ID NO: 1190
  source 1..354: mol_type = other DNA

SEQ ID NO: 1338 - protein, 118 aa, synthetic construct; identical to SEQ ID NO: 1191

SEQ ID NO: 1339 - DNA, 336 bp, synthetic construct; identical to SEQ ID NO: 1192
  source 1..336: mol_type = other DNA

SEQ ID NO: 1340 - protein, 112 aa, synthetic construct; identical to SEQ ID NO: 1193

SEQ ID NO: 1341 - DNA, 354 bp, synthetic construct; identical to SEQ ID NO: 1194
  source 1..354: mol_type = other DNA

SEQ ID NO: 1342 - protein, 118 aa, synthetic construct; identical to SEQ ID NO: 1195

SEQ ID NO: 1343 - DNA, 336 bp, synthetic construct; identical to SEQ ID NO: 1196
  source 1..336: mol_type = other DNA

SEQ ID NO: 1344 - protein, 112 aa, synthetic construct; identical to SEQ ID NO: 1197

SEQ ID NO: 1345 - protein, 8 aa, synthetic construct
GYTFASYY

SEQ ID NO: 1346 - protein, 8 aa, synthetic construct
GYTFASYY

SEQ ID NO: 1347 - protein, 8 aa, synthetic construct
GYTFASSW

SEQ ID NO: 1348 - protein, 9 aa, synthetic construct
STWYRPLDY

SEQ ID NO: 1349 - protein, 9 aa, synthetic construct
STWYRPNDY

SEQ ID NO: 1350 - protein, 9 aa, synthetic construct
TTRYRPLDY

SEQ ID NO: 1351 - protein, 9 aa, synthetic construct
LTYYRPPDY

SEQ ID NO: 1352 - protein, 8 aa, synthetic construct
HQYLSSYT

SEQ ID NO: 1353 - protein, 8 aa, synthetic construct
HQYISSYT

SEQ ID NO: 1354 - protein, 8 aa, synthetic construct
HQYKSSYT

SEQ ID NO: 1355 - protein, 8 aa, synthetic construct
HQYRSSYT

SEQ ID NO: 1356 - protein, 8 aa, synthetic construct
HQYYSSYT

SEQ ID NO: 1357 - DNA, 354 bp, synthetic construct; identical to SEQ ID NO: 966
  source 1..354: mol_type = other DNA

SEQ ID NO: 1358 - protein, 118 aa, synthetic construct; identical to SEQ ID NO: 967

SEQ ID NO: 1359 - DNA, 336 bp, synthetic construct; identical to SEQ ID NO: 968
  source 1..336: mol_type = other DNA

SEQ ID NO: 1360 - protein, 112 aa, synthetic construct; identical to SEQ ID NO: 969

SEQ ID NO: 1361 - DNA, 360 bp, synthetic construct
  source 1..360: mol_type = other DNA
gaggtgcagctggtggagtctggggctgaggtgaagaagcctggggcctcagtgaaggtctcctgcaagacttctggatacaccttcaccgaccactatatccactgggtgcgacaggcccctggacaagggcttgagtggatgggatggatcaaccctagcagtggtggcacagagtatgcacagaagtttcagggcagggtcaccatgaccagggacacgcccattagcacggcctacatggatctgagcgggctgagatctgacgacacggccgtttattactgtgcgagagagactatcggtggctggaacgctttggacgtctggggccaaggaaccctggtcaccgtctcctca

SEQ ID NO: 1362 - protein, 120 aa, synthetic construct
EVQLVESGAEVKKPGASVKVSCKTSGYTFTDHYIHWVRQAPGQGLEWMGWINPSSGGTEYAQKFQGRVTMTRDTPISTAYMDLSGLRSDDTAVYYCARETIGGWNALDVWGQGTLVTVSS

SEQ ID NO: 1363 - DNA, 333 bp, synthetic construct
  source 1..333: mol_type = other DNA
cagcctgtgctgactcagccaccctcagcgtctgggacccccgggcagagggtcaccatctcttgttctggaagcagctccaacatcggaattaatactgtaaactggtaccagcagctcccaagaacgccccccaaactcctcatctatactaataatcagcggccctcaggggtccctgaccgattctctggctccaagtctgacacctcagcctccctggccatcagtggcctccagtctgaggatgaggctgattattactgtgcagcttgggatgacaccctgaatggtccactattcggcggagggaccaaggtgaccgtcctaggt

SEQ ID NO: 1364 - protein, 111 aa, synthetic construct
QPVLTQPPSASGTPGQRVTISCSGSSSNIGINTVNWYQQLPRTPPKLLIYTNNQRPSGVPDRFSGSKSDTSASLAISGLQSEDEADYYCAAWDDTLNGPLFGGGTKVTVLG

SEQ ID NO: 1365 - DNA, 357 bp, synthetic construct
  source 1..357: mol_type = other DNA
gaggtgcagctggtgcagtctgggtctgagttgaagaagcctggggcctcagtgaaggtctcctgcaaggcttctggatacaccttcaccggctactatatgcactgggtgcgacaggcccctggacaagggcttgagtggatgggatggatcaaccctaacagtggtggcacaaactatgcacagaagtttcagggcagggtcaccgtgaccacagacacgtccacgagcacagcctacatggagctgaggagcctgagatctgacgacacggccgtctattactgtgcgagagagggtgttcactcggatgcttttgatgtgtggggccaagggaccacggtcaccgtctcctca

SEQ ID NO: 1366 - protein, 119 aa, synthetic construct
EVQLVQSGSELKKPGASVKVSCKASGYTFTGYYMHWVRQAPGQGLEWMGWINPNSGGTNYAQKFQGRVTVTTDTSTSTAYMELRSLRSDDTAVYYCAREGVHSDAFDVWGQGTTVTVSS

SEQ ID NO: 1367 - DNA, 321 bp, synthetic construct
  source 1..321: mol_type = other DNA
gaaacgacactcacgcagtctccagccaccctgtctgtgtctccaggggaaagggccaccctctcctgcagggccagtcagagtgtttacaccaacttagcctggtaccaacagaaacctggccaggctcccagtctcctcatctatggtgcatccagccgggccaccggcatcccagacagattcagtggcagcgggtctgggacagacttcactctcaccatcagcagactggagcctgaagattttgcagtgtattactgtcagcagtatggtagctcacatttcactttcggccctgggaccaaagtggatatcaaa

SEQ ID NO: 1368 - protein, 107 aa, synthetic construct
ETTLTQSPATLSVSPGERATLSCRASQSVYTNLAWYQQKPGQAPSLLIYGASSRATGIPDRFSGSGSGTDFTLTISRLEPEDFAVYYCQQYGSSHFTFGPGTKVDIK

SEQ ID NO: 1369 - DNA, 360 bp, synthetic construct
  source 1..360: mol_type = other DNA
gaggtgcagctggtgcagtctggggctgaggtgaagaagcctggggcctcagtgaaggtctcctgcaagacttctggatacaccttcaccgaccactatatccactgggtgcgacaggcccctggacaagggcttgagtggatgggatggatcaaccctagcagtggtggcacagagtatgcacagaagtttcagggcagggtcaccatgaccagggacacgcccattagcacggcctacatggatctgagcgggctgagatctgacgacacggccgtttattactgtgcgagagagactatcggtggctggaacgctttggacgtctggggccaagggaccacggtcaccgtctcctca

SEQ ID NO: 1370 - protein, 120 aa, synthetic construct
EVQLVQSGAEVKKPGASVKVSCKTSGYTFTDHYIHWVRQAPGQGLEWMGWINPSSGGTEYAQKFQGRVTMTRDTPISTAYMDLSGLRSDDTAVYYCARETIGGWNALDVWGQGTTVTVSS

SEQ ID NO: 1371 - DNA, 333 bp, synthetic construct
  source 1..333: mol_type = other DNA
cagtctgtgctgactcagccaccctcagcgtctgggtcccccgggcagagggtcaccatgtcttgctctggaagcagctccaccatcgggaggcattctgtaaactggtaccagcagctcccaggaacggcccccaaactcctcatctatgctaacaatcagcggccctcaggggtccctggccgattctctgcctccaagtctgacacctcagcctccctggccatcagtgggctccggtccgaggatgaggctaattattactgtgcagcgtgggatgacagtctcagtggcgtgctctttggcggtgggaccaaggtgaccgtcctaggt

SEQ ID NO: 1372 - protein, 111 aa, synthetic construct
QSVLTQPPSASGSPGQRVTMSCSGSSSTIGRHSVNWYQQLPGTAPKLLIYANNQRPSGVPGRFSASKSDTSASLAISGLRSEDEANYYCAAWDDSLSGVLFGGGTKVTVLG

SEQ ID NO: 1373 - DNA, 360 bp, synthetic construct
  source 1..360: mol_type = other DNA
gaggtgcagctggtggagtctggggctgaggtgaagaagcctggggcctcagtgaaggtctcctgcaagacttctggatacaccttcaccgaccactatatccactgggtgcgacaggcccctggacaagggcttgagtggatgggatggatcaaccctagcagtggtggcacagagtatgcacagaagtttcagggcagggtcaccatgaccagggacacgcccattagcacggcctacatggatctgagcgggctgagatctgacgacacggccgtttattactgtgcgagagagactatcggtggctggaacgctttggacgtctggggccaaggcaccctggtcaccgtctcctca

SEQ ID NO: 1374 - protein, 120 aa, synthetic construct; identical to SEQ ID NO: 1362

SEQ ID NO: 1375 - DNA, 327 bp, synthetic construct
  source 1..327: mol_type = other DNA
ctgcctgtgctgactcagccaccctcagtgtcagtggccccaggacagacggccaggataacctgtgggggacacaagattggaactaaaagtgtgcactggtaccagcagaagccaggccaggcccctgtactggtcgtctatgatgatcgcgaccggccctcagggatccctgagcgattctctggctccaactctgggggcacggccaccctgaccatcagcagggtcgaagccggggatgaggccgactattactgtcaggtgtgggatagtaatagtgatcatgtggtgttcggcggagggaccaagctgaccgtcctaagt

SEQ ID NO: 1376 - protein, 109 aa, synthetic construct
MPVLTQPPSVSVAPGQTARITCGGHKIGTKSVHWYQQKPGQAPVLVVYDDRDRPSGIPERFSGSNSGGTATLTISRVEAGDEADYYCQVWDSNSDHVVFGGGTKLTVLS

SEQ ID NO: 1377 - DNA, 360 bp, synthetic construct
  source 1..360: mol_type = other DNA
gaggtgcagctggtgcagtctggggctgatgtgaagaagcctggggcctcagtgaaggtctcctgcaaggcttctggatacaccttcaccggctactatatacactgggtgcgacaggcccctggacaagggcttgagtggatgggatggatcaaccctaacagtggtggcacaaactatgcacagaagtttcagggcagggtcaccatgaccagggacacgtccatcagcacagcctacatggagctgagcaggctgagatctgacgacacggccgtctatttttgtgtgagagaggtgaaagattactattattacatggacgtctggggcagagggaccacggtcaccgtctcctca

SEQ ID NO: 1378 - protein, 120 aa, synthetic construct
EVQLVQSGADVKKPGASVKVSCKASGYTFTGYYIHWVRQAPGQGLEWMGWINPNSGGTNYAQKFQGRVTMTRDTSISTAYMELSRLRSDDTAVYFCVREVKDYYYYMDVWGRGTTVTVSS

SEQ ID NO: 1379 - DNA, 336 bp, synthetic construct
  source 1..336: mol_type = other DNA
aattttatgctgactcagccccactctgtgtcggaatctccggggaagacggttaccatctcgtgcacccgcagcagcggcagcattgccagcaactccgtgcagtggtacctgcagcgcccgggcagtgcccccaccactctgatctttgacaataaacaaagaccgtctggggtccctgatcgcttctctggctccatcgacagctcctccaactctgcctccctcagcatctctgggctgacgactgaggacgaggctgactatttctgtcagtcttatgatgacagtgagcaagtggtgttcggcggagggaccaagctgaccgtcctaagt

SEQ ID NO: 1380 - protein, 112 aa, synthetic construct
NFMLTQPHSVSESPGKTVTISCTRSSGSIASNSVQWYLQRPGSAPTTLIFDNKQRPSGVPDRFSGSIDSSSNSASLSISGLTTEDEADYFCQSYDDSEQVVFGGGTKLTVLS

SEQ ID NO: 1381 - DNA, 363 bp, synthetic construct
  source 1..363: mol_type = other DNA
gaggtgcagctggtggagtctggggctgaggtgaagaagcctggggcctcagtgaaggtctcctgcaaggcttctggatacaccttcaccggctactatatgcactgggtgcgacaggcccctggacaagggcttgagtggttggggtgggtcaaccctcacagtggtggcacaaactatgcacagaagtttcagggcagggtcaccatgaccagggacacgtccatcagcacagcctacatggagctgagcagactgagatctgacgacacggccgtatattactgtgcgagagagactgatatctctgctaattatcactttgactactggggccagggcaccctggtcaccgtctcctca

SEQ ID NO: 1382 - protein, 121 aa, synthetic construct
EVQLVESGAEVKKPGASVKVSCKASGYTFTGYYMHWVRQAPGQGLEWLGWVNPHSGGTNYAQKFQGRVTMTRDTSISTAYMELSRLRSDDTAVYYCARETDISANYHFDYWGQGTLVTVSS

SEQ ID NO: 1383 - DNA, 336 bp, synthetic construct
  source 1..336: mol_type = other DNA
cagtctgccctgactcagcctgcctccgtgtctgggtctcctggacagtcgatcaccatctcctgcactggaaccagcagtgatgttgggagttataacgctgtctcctggtaccaacaccacccaggcaaagcccccaaactcatgatttatgaggtcagtaagcggccctcaggggtttctaatcggttctctggctccaagtctggcaacacggcctccctgacaatctctgggctccgggctgaggacgaggctgattattattgtgcaacatgggatgacagcctgaaaggtccggtgttcggcggagggaccaagctgaccgtcctgggt

SEQ ID NO: 1384 - protein, 113 aa, synthetic construct
QSALTQPASVSGSPGQSITISCTGTSSDVGSYNAVSWYQHHPGKAPKLMIYEVSKRPSGVSNRFSGSKSGNTASLTISGLRAEDEADYYCATWDDSLKGPVFGGGTKLTVLGE

SEQ ID NO: 1385 - DNA, 360 bp, synthetic construct
  source 1..360: mol_type = other DNA
gaggtgcagctggtgcagtctggggctgaggtgaagaagcctggggcctcagtgaaggtctcctgcaaggcttctggatacaccttcaccggctactatatgcactgggtgcgacaggcccctggacaagggcttgaatggatgggatggatcaaccctaaaactggtgacacaaactatgcacagaagtttcagggcagggtcgccttgagcagggacacgtccttcaacacagcctacatggacctgagcagcctcagatctgacgacacggccgtctattactgtgcgagagagggcctgtcgaccagcagtccccttgactactggggccagggaaccctggtcaccgtctcctca

SEQ ID NO: 1386 - protein, 120 aa, synthetic construct
EVQLVQSGAEVKKPGASVKVSCKASGYTFTGYYMHWVRQAPGQGLEWMGWINPKTGDTNYAQKFQGRVALSRDTSFNTAYMDLSSLRSDDTAVYYCAREGLSTSSPLDYWGQGTLVTVSS

SEQ ID NO: 1387 - DNA, 327 bp, synthetic construct
  source 1..327: mol_type = other DNA
cagcctgggctgactcagccaccctcagtgtcagtggccccaggacagtcggccaagattacctgtggagaaaacgaacttgcaacaaatattgtacactggtaccagcagaagccaggccaggcccctgtgctggtcatctatcatgataacgaccggccctcagggatccctgagcgattctctggctccaacgctgggaacacggccaccctgaccatcagcagggtcgaagccggggatgaggccgacttttactgtcagctgtgggatagtgctagtgatcaagtggtcttcggcggagggaccacgttgaccgtcctaggt

SEQ ID NO: 1388 - protein, 109 aa, synthetic construct
QPGLTQPPSVSVAPGQSAKITCGENELATNIVHWYQQKPGQAPVLVIYHDNDRPSGIPERFSGSNAGNTATLTISRVEAGDEADFYCQLWDSASDQVVFGGGTTLTVLG

SEQ ID NO: 1389 - DNA, 363 bp, synthetic construct
  source 1..363: mol_type = other DNA
gaggtgcagctggtgcagtcaggggctgaggtgaagaggcctggggcctcattgaaggtttcctgcaaggcatctggatacaccttcaccagccactatatacactgggtgcgacaggcccccggacaagggcttgagtggatgggatggatcaacactggcaatggtgacacaagatattcacagaggttccagggcagagtcaccgttaccagggacacatccgcgagcacagtctacatggaactgagcagcctgagatctgaagacacggccgtgtattactgtgcgagagagtctagcagcagctggtttgttgcttttgatgtctggggccaagggaccacggtcaccgtctcctca

SEQ ID NO: 1390 - protein, 121 aa, synthetic construct
EVQLVQSGAEVKRPGASLKVSCKASGYTFTSHYIHWVRQAPGQGLEWMGWINTGNGDTRYSQRFQGRVTVTRDTSASTVYMELSSLRSEDTAVYYCARESSSSWFVAFDVWGQGTTVTVSS

SEQ ID NO: 1391 - DNA, 327 bp, synthetic construct
  source 1..327: mol_type = other DNA
cagcctgtgctgactcagccaccctcggtgtcattggccccaggacagacggccaggattacctgttcggaaaagaacattcgaagtaaaagagtgcactggtaccagcagaagccaggccaggcccctgtcctggtcatgtattctgataacggccggcgctcagggatccctgaccgattttctggctccaactctgggaacacggccaccctgaccatcaccagggtcgaagccggtgatgagggcgacttttactgtcaggtgtgggatccgattactgatcaggtggttttcggcggagggaccaagctgaccgtcctaggt

SEQ ID NO: 1392 - protein, 109 aa, synthetic construct
QPVLTQPPSVSLAPGQTARITCSEKNIRSKRVHWYQQKPGQAPVLVMYSDNGRRSGIPDRFSGSNSGNTATLTITRVEAGDEGDFYCQVWDPITDQVVFGGGTKLTVLG

SEQ ID NO: 1393 - DNA, 372 bp, synthetic construct
  source 1..372: mol_type = other DNA
caggtgcagctggtgcagtctggggctgaggtgaagcagcctgggtcctcagtgaaggtctcctgtaaggcttctggatacaccttcaccggctactatatgcactgggtgcgacaggcccctggagaagggcttgagtggctgggatggatcaaccctcacagtggtggcacaaactatgcacagaagttccagggcagagtcacgattaccgcggacaaatccacgagcacagcctacatggagctgagcagcctgagatctgaggacacggctgtgtattactgtgcgagggagattgtggtggtgactgctccggctgctgcggctatggacgtctggggccaaggcaccctggtcaccgtctcctca

SEQ ID NO: 1394 - protein, 124 aa, synthetic construct
QVQLVQSGAEVKQPGSSVKVSCKASGYTFTGYYMHWVRQAPGEGLEWLGWINPHSGGTNYAQKFQGRVTITADKSTSTAYMELSSLRSEDTAVYYCAREIVVVTAPAAAAMDVWGQGTLVTVSS

SEQ ID NO: 1395 - DNA, 333 bp, synthetic construct
  source 1..333: mol_type = other DNA
cagtctgtgctgactcagccaccctccgcgtccgggtctcctggacagtcagtcaccatctcctgcactggaagcagcagtgacgttgctatttatgaccgtgtctcctggtaccagcagcccccaggcacagcccccaaactcattctttatgatgtccatgatcggccctcaggggtccctgatcgcttctctgggtccaagtctggcaacacggcctccctgaccatctctgggctccaggctgaggacgaggctgattattactgcagttcatacacaaccagcggcacttttgtcttcggaagtgggaccaaggtcaccgtcctaggt

SEQ ID NO: 1396 - protein, 111 aa, synthetic construct
QSVLTQPPSASGSPGQSVTISCTGSSSDVAIYDRVSWYQQPPGTAPKLILYDVHDRPSGVPDRFSGSKSGNTASLTISGLQAEDEADYYCSSYTTSGTFVFGSGTKVTVLG

SEQ ID NO: 1397 - DNA, 366 bp, synthetic construct
  source 1..366: mol_type = other DNA
gaggtgcagctggtgcagtctggggctgaggtgaagaagcctggggcctcagtgaacgtctcctgtaaggcttctggatacaccttcaccggctactatatgcactgggtgcgacaggcccctggacaagggcttgagtggatgggatggatcaaccccaacagtggtggcacaaactatgcacagaagtttcagggcagggtcaccgtgaccacagacacgtccaacagcacagcctacatggagctgaacaggctgaaatctgacgacacggccgtgtattattgtgcgagagaggggtccggggaccttgattccttatacatggacgtctggggcaaagggacaatggtcaccgtctcttca

SEQ ID NO: 1398 - DNA, 324 bp, synthetic construct
  source 1..324: mol_type = other DNA
tcctatgagctgactcagccaccctcggtgtcagtggccccaggacagacggccaggattacctgtggggcaaacaacattggaagtaaaagtgtgcactggtaccagcagaagccaggccaggcccctgtgctggtcgtctatgatgatagcgaccggccctcagggatccctgagcgattctctggctccaactctgggaacacggccaccctgaccatcaccagggtcgaagccggggatgaggccgactattactgtcagctatgggatggtgggagtgatgtggttttcggcggagggaccaagctgaccgtcctaggt

SEQ ID NO: 1399 - protein, 122 aa, synthetic construct
EVQLVQSGAEVKKPGASVNVSCKASGYTFTGYYMHWVRQAPGQGLEWMGWINPNSGGTNYAQKFQGRVTVTTDTSNSTAYMELNRLKSDDTAVYYCAREGSGDLDSLYMDVWGKGTMVTVSS

SEQ ID NO: 1400 - protein, 108 aa, synthetic construct
SYELTQPPSVSVAPGQTARITCGANNIGSKSVHWYQQKPGQAPVLVVYDDSDRPSGIPERFSGSNSGNTATLTITRVEAGDEADYYCQLWDGGSDVVFGGGTKLTVLG

SEQ ID NO: 1401 - DNA, 360 bp, synthetic construct; identical to SEQ ID NO: 1361
  source 1..360: mol_type = other DNA

SEQ ID NO: 1402 - protein, 120 aa, synthetic construct; identical to SEQ ID NO: 1362

SEQ ID NO: 1403 - DNA, 333 bp, synthetic construct; identical to SEQ ID NO: 1363
  source 1..333: mol_type = other DNA

SEQ ID NO: 1404 - protein, 111 aa, synthetic construct; identical to SEQ ID NO: 1364

SEQ ID NO: 1405 - protein, 8 aa, synthetic construct
GYTFTDHY

SEQ ID NO: 1406 - protein, 8 aa, synthetic construct
INPSSGGT

SEQ ID NO: 1407 - protein, 13 aa, synthetic construct
ARETIGGWNALDV

SEQ ID NO: 1408 - protein, 8 aa, synthetic construct
SSNIGINT

SEQ ID NO: 1409 - skipped

SEQ ID NO: 1410 - protein, 11 aa, synthetic construct
AAWDDTLNGPL

SEQ ID NO: 1411 - protein, 8 aa, synthetic construct
GYTFTGYY

SEQ ID NO: 1412 - protein, 8 aa, synthetic construct
INPNSGGT

SEQ ID NO: 1413 - protein, 12 aa, synthetic construct
AREGVHSDAFDV

SEQ ID NO: 1414 - protein, 6 aa, synthetic construct
QSVYTN

SEQ ID NO: 1415 - skipped

SEQ ID NO: 1416 - protein, 9 aa, synthetic construct
  source 1..9: note = 57
QQYGSSHFT

SEQ ID NO: 1417 - protein, 8 aa, synthetic construct
GYTFTDHY

SEQ ID NO: 1418 - protein, 8 aa, synthetic construct
INPSSGGT

SEQ ID NO: 1419 - protein, 13 aa, synthetic construct
ARETIGGWNALDV

SEQ ID NO: 1420 - protein, 8 aa, synthetic construct
SSTIGRHS

SEQ ID NO: 1421 - skipped

SEQ ID NO: 1422 - protein, 11 aa, synthetic construct
AAWDDSLSGVL

SEQ ID NO: 1423 - protein, 8 aa, synthetic construct
GYTFTDHY

SEQ ID NO: 1424 - protein, 7 aa, synthetic construct
INPSSGG

SEQ ID NO: 1425 - protein, 13 aa, synthetic construct
ARETIGGWNALDV

SEQ ID NO: 1426 - protein, 6 aa, synthetic construct
KIGTKS

SEQ ID NO: 1427 - skipped

SEQ ID NO: 1428 - protein, 11 aa, synthetic construct
QVWDSNSDHVV

SEQ ID NO: 1429 - protein, 8 aa, synthetic construct
GYTFTGYY

SEQ ID NO: 1430 - protein, 8 aa, synthetic construct
INPNSGGT

SEQ ID NO: 1431 - protein, 13 aa, synthetic construct
VREVKDYYYYMDV

SEQ ID NO: 1432 - protein, 8 aa, synthetic construct
SGSIASNS

SEQ ID NO: 1433 - skipped

SEQ ID NO: 1434 - protein, 10 aa, synthetic construct
QSYDDSEQVV

SEQ ID NO: 1435 - protein, 8 aa, synthetic construct
GYTFTGYY

SEQ ID NO: 1436 - protein, 8 aa, synthetic construct
VNPHSGGT

SEQ ID NO: 1437 - protein, 14 aa, synthetic construct
ARETDISANYHFDY

SEQ ID NO: 1438 - protein, 9 aa, synthetic construct
SSDVGSYNA

SEQ ID NO: 1439 - skipped

SEQ ID NO: 1440 - protein, 11 aa, synthetic construct
ATWDDSLKGPV

SEQ ID NO: 1441 - protein, 8 aa, synthetic construct
GYTFTGYY

SEQ ID NO: 1442 - protein, 8 aa, synthetic construct
INPKTGDT

SEQ ID NO: 1443 - protein, 13 aa, synthetic construct
AREGLSTSSPLDY

SEQ ID NO: 1444 - protein, 6 aa, synthetic construct
ELATNI

SEQ ID NO: 1445 - skipped

SEQ ID NO: 1446 - protein, 11 aa, synthetic construct
QLWDSASDQVV

SEQ ID NO: 1447 - protein, 8 aa, synthetic construct
GYTFTSHY

SEQ ID NO: 1448 - protein, 8 aa, synthetic construct
INTGNGDT

SEQ ID NO: 1449 - protein, 14 aa, synthetic construct
ARESSSSWFVAFDV

SEQ ID NO: 1450 - protein, 6 aa, synthetic construct
NIRSKR

SEQ ID NO: 1451 - skipped

SEQ ID NO: 1452 - protein, 11 aa, synthetic construct
QVWDPITDQVV

SEQ ID NO: 1453 - protein, 8 aa, synthetic construct
GYTFTGYY

SEQ ID NO: 1454 - protein, 8 aa, synthetic construct
INPHSGGT

SEQ ID NO: 1455 - protein, 17 aa, synthetic construct
AREIVVVTAPAAAAMDV

SEQ ID NO: 1456 - protein, 9 aa, synthetic construct
SSDVAIYDR

SEQ ID NO: 1457 - skipped

SEQ ID NO: 1458 - protein, 10 aa, synthetic construct
SSYTTSGTFV

SEQ ID NO: 1459 - protein, 8 aa, synthetic construct
GYTFTGYY

SEQ ID NO: 1460 - protein, 8 aa, synthetic construct
INPNSGGT

SEQ ID NO: 1461 - protein, 15 aa, synthetic construct
AREGSGDLDSLYMDV

SEQ ID NO: 1462 - protein, 6 aa, synthetic construct
NIGSKS

SEQ ID NO: 1463 - skipped

SEQ ID NO: 1464 - protein, 10 aa, synthetic construct
QLWDGGSDVV

SEQ ID NO: 1465 - protein, 8 aa, synthetic construct
GYTFTDHY

SEQ ID NO: 1466 - protein, 8 aa, synthetic construct
INPSSGGT

SEQ ID NO: 1467 - protein, 13 aa, synthetic construct
ARETIGGWNALDV

SEQ ID NO: 1468 - protein, 8 aa, synthetic construct
SSNIGINT

SEQ ID NO: 1469 - skipped

SEQ ID NO: 1470 - protein, 11 aa, synthetic construct
AAWDDTLNGPL

SEQ ID NO: 1471 - DNA, 390 bp, synthetic construct
  source 1..390: mol_type = other DNA
caggtgcagctgttggagtctgggggaggcgtggtccagcctgggaggtccctgagactctcctgtgcagcctctggattcaccttcagtaactatggcatgcactgggtccgccaggctccaggcaaggggctggagtgggtggcaattatatcatttgatggaagtaaaaaatattatgcaaactccgtgaagggccgatccaccatctccagagacaattccaagaacacgctgtctctgcaaatgaacagcctgggacctgaggacacggctctatattactgtgcgaaactgccctccccgtattactttgatagtcggttcgtgtgggtcgccgccagcgcatttcacttctggggccagggaatcctggtcaccgtctcttca

SEQ ID NO: 1472 - protein, 130 aa, synthetic construct
QVQLLESGGGVVQPGRSLRLSCAASGFTFSNYGMHWVRQAPGKGLEWVAIISFDGSKKYYANSVKGRSTISRDNSKNTLSLQMNSLGPEDTALYYCAKLPSPYYFDSRFVWVAASAFHFWGQGILVTVSS

SEQ ID NO: 1473 - protein, 110 aa, synthetic construct
NFMLTQPPSASGTPGQRVTISCSGSSSNIGGNTVHWFQQLPGTAPKLLIYTNSLRPSGVPDRFSGSKSGTSASLAISGLQSEDEADYYCAAWDDSLNGQVFGGGTKLTVL

SEQ ID NO: 1474 - DNA, 330 bp, synthetic construct
  source 1..330: mol_type = other DNA
aattttatgctgactcagccaccctcagcgtctgggacccccgggcagagggtcaccatctcttgctctggaagcagctccaacatcggaggtaatactgtacactggttccagcagctcccaggaacggcccccaaactcctcatctatactaatagtctgcggccctcaggggtccctgaccgattctctggctccaagtctggcacctcagcctccctggccatcagtgggctccagtctgaggatgaggctgattattactgtgcagcatgggataacagcctaaatggtcaggtgttcggcggagggaccaagctgaccgtccta

SEQ ID NO: 1475 - protein, 110 aa, synthetic construct
NFMLTQPPSASGTPGQRVTISCSGSSSNIGGNTVHWFQQLPGTAPKLLIYTNSLRPSGVPDRFSGSKSGTSASLAISGLQSEDEADYYCAAWDNSLNGQVFGGGTKLTVL

SEQ ID NO: 1476 - protein, 8 aa, synthetic construct
GFTFSNYG

SEQ ID NO: 1477 - protein, 8 aa, synthetic construct
ISFDGSKK

SEQ ID NO: 1478 - protein, 25 aa, synthetic construct
CAKLPSPYYFDSRFVWVAASAFHFW

SEQ ID NO: 1479 - protein, 8 aa, synthetic construct
SSNIGGNT

SEQ ID NO: 1480 - skipped

SEQ ID NO: 1481 - protein, 13 aa, synthetic construct [sequence omitted]

SEQ ID NO: 1482 - protein, 13 aa, synthetic construct
  source 1..13: note = 1453
CAAWDNSLNGQVF

SEQ ID NO: 1483 - protein, 7 aa, synthetic construct
GNTNRPS

SEQ ID NO: 1484 - protein, 5 aa, synthetic construct
GGGGS

SEQ ID NO: 1485 - DNA, 372 bp, synthetic construct
  source 1..372: mol_type = other DNA
caggtgcagctggtgcagtctggagctgaggtgaagaagcctggggcctcagtgaaggtctcctgcaaggcttctggttacacctttaccagctatggtatcagctgggtgcgacaggcccctggacaagggcttgagtggatgggatggatcagcgcttacaatggtaacacaaactatgcacagaagctccagggcagagtcaccatgaccacagacacatccacgagcacagcctacatggagctgaggagcctgagatctgacgacacggccgtgtattactgtgcgagagctctacctagtgggactatactggtcggaggttggttcgacccctggggccagggaaccctggtcaccgtctcctca

SEQ ID NO: 1486 - protein, 124 aa, synthetic construct
QVQLVQSGAEVKKPGASVKVSCKASGYTFTSYGISWVRQAPGQGLEWMGWISAYNGNTNYAQKLQGRVTMTTDTSTSTAYMELRSLRSDDTAVYYCARALPSGTILVGGWFDPWGQGTLVTVSS

SEQ ID NO: 1487 - DNA, 333 bp, synthetic construct
  source 1..333: mol_type = other DNA
aattttatgctgactcagccccactctgtgtcggagtctccggggaagacggtaaccatctcctgcacccgcagcagtggcaacattgccagcaattatgtgcagtggtaccaacagcgcccgggcagtgcccccaccactgtgatctatgaggataaccaaagaccctctggggtccctgatcggttctctggctccatcgacagctcctccaactctgcctccctcaccatctctggactgaagactgaggacgaggctgactactactgtcagtcttatgatagcagcaatctttgggtgttcggcggagggaccaagctgaccgtccta

SEQ ID NO: 1488 - protein, 111 aa, synthetic construct
NFMLTQPHSVSESPGKTVTISCTRSSGNIASNYVQWYQQRPGSAPTTVIYEDNQRPSGVPDRFSGSIDSSSNSASLTISGLKTEDEADYYCQSYDSSNLWVFGGGTKLTVL

SEQ ID NO: 1489 - DNA, 372 bp, synthetic construct
  source 1..372: mol_type = other DNA
gaggtgcagctggtgcagtctgggggaggcgtggtccagcctgggaggtccctgagactctcctgtgcagcctctggattcacctttagcagctatgccctgagctgggtccgccaggctccagggaaggggctggagtgggtctcagctattagtggtggtggtggtagcacatactacgcagactccgtgaagggccggttcaccatctccagagacaattccaagaacacgctgtatctgcaaatgaacagcctgagagccgaggacacggccgtatattactgtgcgaaagacgtgtttccagagactttttcgatgaactacggtatggacgtctggggccaaggaaccctggtcaccgtctcctca

SEQ ID NO: 1490 - protein, 124 aa, synthetic construct
EVQLVQSGGGVVQPGRSLRLSCAASGFTFSSYALSWVRQAPGKGLEWVSAISGGGGSTYYADSVKGRFTISRDNSKNTLYLQMNSLRAEDTAVYYCAKDVFPETFSMNYGMDVWGQGTLVTVSS

SEQ ID NO: 1491 - DNA, 324 bp, synthetic construct
  source 1..324: mol_type = other DNA
tcttctgagctgactcaggaccctgctgtgtctgtggccttgggacagacagtcaggatcacatgccaaggagacagcctcagaagctattatgcaagctggtaccagcagaagccaggacaggcccctgtacttgtcatctatggtaaaaacaaccggccctcagggatcccagaccgattctctggctccagctcaggaaacacagcttccttgaccatcactggggctcaggcggaagatgaggctgactattactgtaactcccgggacagcagtggtaaccattatgtcttcggaactgggaccaaggtcaccgtccta

SEQ ID NO: 1492 - protein, 108 aa, synthetic construct
SSELTQDPAVSVALGQTVRITCQGDSLRSYYASWYQQKPGQAPVLVIYGKNNRPSGIPDRFSGSSSGNTASLTITGAQAEDEADYYCNSRDSSGNHYVFGTGTKVTVL

SEQ ID NO: 1493 - DNA, 384 bp, synthetic construct
  source 1..384: mol_type = other DNA
caggtgcagctggtgcagtctgggggaggcgtggtacagcctggggggtccctgagactctcctgtgcagcctctggattcacctttgatgattatgccatgcactgggtccgtcaagctccagggaagggtctggagtgggtctctcttattagtggggatggtggtagcacatactatgcagactctgtgaagggccgattcaccatctccagagacaacagcaaaaactccctgtatctgcaaatgaacagtctgagaactgaggacaccgccttgtattactgtgcaaaagtgctcctcccctgtagtagtaccagctgctatggaagcgtcggtgcttttgatatctggggccaagggaccacggtcaccgtctcctca

SEQ ID NO: 1494 - protein, 128 aa, synthetic construct
QVQLVQSGGGVVQPGGSLRLSCAASGFTFDDYAMHWVRQAPGKGLEWVSLISGDGGSTYYADSVKGRFTISRDNSKNSLYLQMNSLRTEDTALYYCAKVLLPCSSTSCYGSVGAFDIWGQGTTVTVSS

SEQ ID NO: 1495 - DNA, 324 bp, synthetic construct
  source 1..324: mol_type = other DNA
taggacgatgagctcggtcccagctccgaagacataatgatcactattattatcccacacctgacagtaataatcggcctcatcaccggcttcgaccctgctgatggtcagggtggccgtgttcccagagttggagccagagaatcgctcagagatccctgagggccggtccctatcagagtagatgaccaacgcaggggcctggcctggcttctgctggtaccagtgcacactcttccttccaatgtcgcttcccccacaggtaatcctggccgtctttcctggggccactgacactgagggtgcctgagtcagcacaggcag

SEQ ID NO: 1496 - protein, 108 aa, synthetic construct
LPVLTQAPSVSVAPGKTARITCGGSDIGRKSVHWYQQKPGQAPALVIYSDRDRPSGISERFSGSNSGNTATLTISRVEAGDEADYYCQVWDNNSDHYVFGAGTELIVL

SEQ ID NO: 1497 - DNA, 351 bp, synthetic construct
  source 1..351: mol_type = other DNA
caggtgcagctggtgcagtctgggggaagtgtggtacggcctggggaatccctcagactctcctgtgtagcctctggattcatctttgataattatgacatgagttgggtccgccaagttccagggaaggggctggagtgggtctctcgtgttaattggaatggtggtagcacaacttatgcagacgctgtgaagggccgattcaccatctccagagacaacaccaagaactccctgtatctacaaatgaacaacctgagagccgaagacacggccgtgtattactgtgtgcgcgagtttgtcggtgcttatgatctctggggccaggggaccacggtcaccgtctcctca

SEQ ID NO: 1498 - protein, 117 aa, synthetic construct
QVQLVQSGGSVVRPGESLRLSCVASGFIFDNYDMSWVRQVPGKGLEWVSRVNWNGGSTTYADAVKGRFTISRDNTKNSLYLQMNNLRAEDTAVYYCVREFVGAYDLWGQGTTVTVSS

SEQ ID NO: 1499 - DNA, 327 bp, synthetic construct
  source 1..327: mol_type = other DNA
cagtctgccctgactcagcctgcctccgtgtctgggtctcctggacagtcgatcaccatctcctgcactggaaccagcagtgacgttggtggttataactatgtctcctggtaccaacaacacccaggcaaagcccccaaactcatgatttatgatgtcagtaatcggccctcaggggtttctaatcgcttctctggctccaagtctggcaacacggcctccctgaccatctctgggctccaggctgaggacgaggctgattattactgcagctcatatacaagcagcactctgccgttcggcggagggaccaagctgaccgtccta

SEQ ID NO: 1500 - protein, 109 aa, synthetic construct
QSALTQPASVSGSPGQSITISCTGTSSDVGGYNYVSWYQQHPGKAPKLMIYDVSNRPSGVSNRFSGSKSGNTASLTISGLQAEDEADYYCSSYTSSTLPFGGGTKLTVL

SEQ ID NO: 1501 - DNA, 363 bp, synthetic construct
  source 1..363: mol_type = other DNA
caggtgcagctggtgcagtctggggctgaggtgaagaagccaggggccacagtgaaggtctcctgcaaggtttttggagacaccttccgcggcctctatatacactgggtgcgacaggcccctggacaagggcttgagtggatgggagggatcatccctatctttggtacagcaaactacgcacagaagttccagggcagagtcacgattaccacggacgaatccacgagcacagcctacatggagctgagcagcctgagatctgaggacacggccgtgtattactgtgcgagcggactacgttgggggatctggggctggttcgacccctggggccagggcaccctggtcaccgtctcctca

SEQ ID NO: 1502 - protein, 121 aa, synthetic construct
QVQLVQSGAEVKKPGATVKVSCKVFGDTFRGLYIHWVRQAPGQGLEWMGGIIPIFGTANYAQKFQGRVTITTDESTSTAYMELSSLRSEDTAVYYCASGLRWGIWGWFDPWGQGTLVTVSS

SEQ ID NO: 1503 - DNA, 321 bp, synthetic construct
  source 1..321: mol_type = other DNA
gaaattgtgttgacgcagtctccagccaccctgtctttgtctccaggggaaagagccaccctctcctgcagggccagtcagagtattggcaacagcttagcctggtaccagcagaaacctggccaggctcccaggctcctcatgtatggtgcatccagcagggccactggcatcccagacaggttcagtggcagtggggctgggacagacttcactctcaccatcagcagcctagagcctgaagattttgcaacgtattactgtcagcagcatactatcccaacattctctttcggccctgggaccaaagtggaagtcaaa

SEQ ID NO: 1504 - protein, 107 aa, synthetic construct
EIVLTQSPATLSLSPGERATLSCRASQSIGNSLAWYQQKPGQAPRLLMYGASSRATGIPDRFSGSGAGTDFTLTISSLEPEDFATYYCQQHTIPTFSFGPGTKVEVK

SEQ ID NO: 1505 - DNA, 363 bp, synthetic construct
  source 1..363: mol_type = other DNA
gaggtgcagctggtgcagtctggggctgagctgaagaagcctgggtcctcggtgaaggtctcctgcaaggcttttggaggcaccttcagtgacaatgctatcagctgggtgcgacaggcccctggacaagggcctgagtggatggggggcatcattcctatctttggaaaaccaaactacgcacagaagttccagggcagagtcacgattaccgcggacgaatccacgagcactgcctacatggtcctgagcagcctgagatctgaggacacggccgtatattactgtgcgagaactatggttcggggctttcttggggttatggacgtctggggccaagggaccacggtcaccgtctcctca

SEQ ID NO: 1506 - protein, 121 aa, synthetic construct
EVQLVQSGAELKKPGSSVKVSCKAFGGTFSDNAISWVRQAPGQGPEWMGGIIPIFGKPNYAQKFQGRVTITADESTSTAYMVLSSLRSEDTAVYYCARTMVRGFLGVMDVWGQGTTVTVSS

SEQ ID NO: 1507 - DNA, 321 bp, synthetic construct
  source 1..321: mol_type = other DNA
gatattgtgatgacccagactccatccttcctgtccgcatccataggagacagagtcaccatcacttgccgggccagtcagggcattggcagttatttagcctggtatcagcaaagaccaggggaagcccctaagctcctgatctatgctgcatcgactttgcaaagtggagtcccatcaaggttcagcggcagtggatctgggacggacttcactctcacaatcagcaacctgcagcctgaagattttgcaacttattactgtcaacagcttaataattacccgatcaccttcggccaagggacacgactggagattaaa

SEQ ID NO: 1508 - protein, 107 aa, synthetic construct
DIVMTQTPSFLSASIGDRVTITCRASQGIGSYLAWYQQRPGEAPKLLIYAASTLQSGVPSRFSGSGSGTDFTLTISNLQPEDFATYYCQQLNNYPITFGQGTRLEIK

SEQ ID NO: 1509 - DNA, 375 bp, synthetic construct
  source 1..375: mol_type = other DNA
caggtgcagctggtgcagtctgggggaggcttggtacagcctggggggtccctgagactctcctgtgcagcctctggattcacctttagcagctatgccatgagctgggtccgccaggctccagggaaggggctggagtgggtctcagctattagtggtagtggtggtagcacatactacgcagactccgtgaagggccggttcaccatctccagagacaattccaagaacacgctgtatctgcaaatgaacagcctgagagccgaggacacggccgtatattactgtgcgaaagatcagttcgttacgatttttggagtgccaagatacggtatggacgtctggggccaagggaccacggtcaccgtctcctca

SEQ ID NO: 1510 - protein, 125 aa, synthetic construct
QVQLVQSGGGLVQPGGSLRLSCAASGFTFSSYAMSWVRQAPGKGLEWVSAISGSGGSTYYADSVKGRFTISRDNSKNTLYLQMNSLRAEDTAVYYCAKDQFVTIFGVPRYGMDVWGQGTTVTVSS

SEQ ID NO: 1511 - DNA, 315 bp, synthetic construct
  source 1..315: mol_type = other DNA
cagtctgccctgactcagccaccctcagtgtccgtgtccccaggacagacagccaacatcccctgctctggagataaattggggaataaatatgcttactggtatcagcagaagccaggccagtcccctgtactgctcatctatcaagatatcaagcggccctcaaggatccctgagcgattctctggctccaactctgcggacacagccactctgaccatcagcgggacccaggctatggatgaggctgactattactgtcagacgtgggacaacagcgtggtcttcggcggcgggaccaagctgaccgtcctc

SEQ ID NO: 1512 - protein, 105 aa, synthetic construct
QSALTQPPSVSVSPGQTANIPCSGDKLGNKYAYWYQQKPGQSPVLLIYQDIKRPSRIPERFSGSNSADTATLTISGTQAMDEADYYCQTWDNSVVFGGGTKLTVL

SEQ ID NO: 1513 - DNA, 360 bp, synthetic construct
  source 1..360: mol_type = other DNA
caggtgcagctggtgcagtctggggctgaggtgaagaagcctgggtcctcggtgaaggtctcctgcaaggcttctggaggcaccttcagcagctatgctatcagctgggtgcgacaggcccctggacaagggcttgagtggatgggagggatcatccctatctttggtacagcaaactacgcacagaagttccagggcagagtcacgattaccgcggacaaatccacgagcacagcctacatggagctgagcagcctgagatctgaggacacggccgtctattactgtgcgagagggcgtcaaatgttcggtgcgggaattgatttctggggcccgggcaccctggtcaccgtctcctca

SEQ ID NO: 1514 - protein, 120 aa, synthetic construct
QVQLVQSGAEVKKPGSSVKVSCKASGGTFSSYAISWVRQAPGQGLEWMGGIIPIFGTANYAQKFQGRVTITADKSTSTAYMELSSLRSEDTAVYYCARGRQMFGAGIDFWGPGTLVTVSS

SEQ ID NO: 1515 - DNA, 336 bp, synthetic construct
  source 1..336: mol_type = other DNA
aattttatgctgactcagccccactctgtgtcggagtctccggggaagacggtaaccatctcctgcacccgcagcagtggcagcattgacagcaactatgtgcagtggtaccagcagcgcccgggcagcgcccccaccactgtgatctatgaggataaccaaagaccctctggggtccctgatcggttctctggctccatcgacagctcctccaactctgcctccctcaccatctctggactgaagactgaggacgaggctgactactactgtcagtcttatgatagcaacaatcgtcatgtgatattcggcggagggaccaagctgaccgtccta

SEQ ID NO: 1516 - protein, 112 aa, synthetic construct
NFMLTQPHSVSESPGKTVTISCTRSSGSIDSNYVQWYQQRPGSAPTTVIYEDNQRPSGVPDRFSGSIDSSSNSASLTISGLKTEDEADYYCQSYDSNNRHVIFGGGTKLTVL

SEQ ID NO: 1517 - DNA, 354 bp, synthetic construct
  source 1..354: mol_type = other DNA
gaggtgcagctggtggagtctggggctgaagtaaagaagcctgggtcctcggtgaaagtctcctgcaaggtttcaggaggcacattcggcacctatgctctcaactgggtgcgccaggcccctggacaagggcttgagtggatgggaaggatcgtccctctcattggtctagtaaactacgcacataactttgagggcagaatctcgattaccgcggacaagtccacgggcacagcctacatggaactgagcaacctgagatctgacgacacggccgtgtattactgtgcgagagaggtctacggtggtaactccgactactggggccagggaaccctggtcaccgtctcctca

SEQ ID NO: 1518 - protein, 118 aa, synthetic construct
EVQLVESGAEVKKPGSSVKVSCKVSGGTFGTYALNWVRQAPGQGLEWMGRIVPLIGLVNYAHNFEGRISITADKSTGTAYMELSNLRSDDTAVYYCAREVYGGNSDYWGQGTLVTVSS

SEQ ID NO: 1519 - DNA, 330 bp, synthetic construct
  source 1..330: mol_type = other DNA
aattttatgctgactcagccccactcagtgtcggagtctccggggaagacggtaaccatctcctgcactcgcagtagtggcaacattggcaccaactatgtgcagtggtaccagcagcgcccgggcagtgcccccgtcgctttgatctacgaggattatcgaagaccctctggggtccctgatcggttctctggctccatcgacagctcctccaactctgcctccctcatcatctctggactgaagcctgaggacgaggctgactactactgtcagtcttatcatagcagcggttgggaattcggcggagggaccaagctgaccgtcctc

SEQ ID NO: 1520 - protein, 110 aa, synthetic construct
NFMLTQPHSVSESPGKTVTISCTRSSGNIGTNYVQWYQQRPGSAPVALIYEDYRRPSGVPDRFSGSIDSSSNSASLIISGLKPEDEADYYCQSYHSSGWEFGGGTKLTVL

SEQ ID NO: 1521 - DNA, 360 bp, synthetic construct
  source 1..360: mol_type = other DNA
caggtgcagctggtgcagtctggaggtgaggtgaagaagccgggggcctcagtgaaggtctcctgcaaggcttctggttacaccttgagcagtcatggtataacctgggtgcgacaggcccctggacaagggcttgagtggatgggatggatcagcgctcacaatggtcacgctagcaatgcacagaaggtggaggacagagtcactatgactactgacacatccacgaacacagcctacatggaactgaggagcctgacagctgacgacacggccgtgtattactgtgcgagagtacatgctgccctctactatggtatggacgtctggggccaaggaaccctggtcaccgtctcctca

SEQ ID NO: 1522 - protein, 120 aa, synthetic construct
QVQLVQSGGEVKKPGASVKVSCKASGYTLSSHGITWVRQAPGQGLEWMGWISAHNGHASNAQKVEDRVTMTTDTSTNTAYMELRSLTADDTAVYYCARVHAALYYGMDVWGQGTLVTVSS

SEQ ID NO: 1523 - DNA, 324 bp, synthetic construct
  source 1..324: mol_type = other DNA
cagtctgtgctgactcagccaccctcggtgtcagtggccccaggacagacggccaggattacctgtgggggaaacaacattggaagtaaaggtgtgcactggtatcagcagaagccaggccaggcccctgtactggtcgtctatgatgatagtgaccggccctcagggatccctgagcgattctctggctccaactctgggaacacggccaccctgaccatcagcagggtcgaagccggggatgaggccgactattactgtcaggtgtgggatagtagtagtgatcattgggtgttcggcggagggaccaagctgaccgtccta

SEQ ID NO: 1524 - protein, 108 aa, synthetic construct
QSVLTQPPSVSVAPGQTARITCGGNNIGSKGVHWYQQKPGQAPVLVVYDDSDRPSGIPERFSGSNSGNTATLTISRVEAGDEADYYCQVWDSSSDHWVFGGGTKLTVL

SEQ ID NO: 1525 - DNA, 363 bp, synthetic construct
  source 1..363: mol_type = other DNA
caggtgcagctgcaggagtcggggggaggcgtggtgcagcctgggaggtccctgagactctcctgttcagcctctggattcaccttcagcagacatggcatgcactgggtccgccaggctccaggcaaggggctggagtgggtggcagtgatatcacatgatggaagtgtaaaatactatgcagactccatgaagggccgattcagcatctccagagacaattccaacaacacactgtatctccaaatggacagcctgagagctgacgacacggccgtttattactgtgcgagaggactgtcgtaccaggtgtcggggtggttcgacccctggggccagggcaccctggtcaccgtctcctca

SEQ ID NO: 1526 - protein, 121 aa, synthetic construct
QVQLQESGGGVVQPGRSLRLSCSASGFTFSRHGMHWVRQAPGKGLEWVAVISHDGSVKYYADSMKGRFSISRDNSNNTLYLQMDSLRADDTAVYYCARGLSYQVSGWFDPWGQGTLVTVSS

SEQ ID NO: 1527 - DNA, 333 bp, synthetic construct
  source 1..333: mol_type = other DNA
aattttatgctgactcagccccactctgtgtcggagtctccggggaagacggtaaccatctcctgcacccgcagcagtggcagcattgccagcaactatgtgcagtggtaccagcagcgcccgggcagtgcccccaccactgtgatctatgaggataaccaaagaccctctggggtccctgatcggttctctggctccatcgacagctcctccaactctgcctccctcaccatctctggactgaagactgaggacgaggctgactactactgtcagtcttatgatagcaccaccccttcggtgttcggcggcgggaccaagctgaccgtccta

SEQ ID NO: 1528 - protein, 111 aa, synthetic construct
NFMLTQPHSVSESPGKTVTISCTRSSGSIASNYVQWYQQRPGSAPTTVIYEDNQRPSGVPDRFSGSIDSSSNSASLTISGLKTEDEADYYCQSYDSTTPSVFGGGTKLTVL

SEQ ID NO: 1529 - DNA, 360 bp, synthetic construct
  source 1..360: mol_type = other DNA
caggtgcagctggtgcagtctggagctgaggtgaagaagcctggggcctcagtgaaggtctcctgcaaggcttctggttacacctttaccagctatggtatcagctgggtgcgacaggcccctggacaagggcttgagtggatgggatggaccagccctcataatggtctcacagcatttgcacagatcctagagggccgagtcaccatgaccacagacacatccacgaacacagcctacatggaattgaggaacctgacatttgatgacacggccgtttatttctgtgcgaaagtacatcctgtcttctcttatgcgttggacgtctggggccaaggcaccctggtcaccgtctcctca

SEQ ID NO: 1530 - protein, 120 aa, synthetic construct
QVQLVQSGAEVKKPGASVKVSCKASGYTFTSYGISWVRQAPGQGLEWMGWTSPHNGLTAFAQILEGRVTMTTDTSTNTAYMELRNLTFDDTAVYFCAKVHPVFSYALDVWGQGTLVTVSS

SEQ ID NO: 1531 - DNA, 330 bp, synthetic construct
  source 1..330: mol_type = other DNA
aattttatgctgactcagccccactctgtgtcggagtccccggggaagacggtaaccatctcctgcacccgcagcagtggcagcattgccagcaactatgtacagtggtaccagcagcgcccgggcagttcccccaccactgtgatctatgaagataaccaaagaccctctggggtccctgatcggttctctggctccatcgacacctcctccaactctgcctccctcaccatctctggactgaagactaaggacgaggcggactactactgtcagtcttatgatggcatcactgtgattttcggcggagggaccaagttgaccgtccta

SEQ ID NO: 1532 - protein, 110 aa, synthetic construct
NFMLTQPHSVSESPGKTVTISCTRSSGSIASNYVQWYQQRPGSSPTTVIYEDNQRPSGVPDRFSGSIDTSSNSASLTISGLKTKDEADYYCQSYDGITVIFGGGTKLTVL

SEQ ID NO: 1533 - DNA, 354 bp, synthetic construct
  source 1..354: mol_type = other DNA
gaggtgcagctggtggagtctggagctgaggtgatgaaccctgggtcctcggtgagggtctcctgcaggggttctggaggcgacttcagtacctatgctttcagctgggtgcgacaggcccctggacaagggcttgagtggatgggaaggatcatccctatccttggtatagcaaactacgcacagaagttccagggcagggtcacgattaccgcggacaaatccacgagcacagcctacatggagctgagcagcctgagatctgacgatacggccgtgtattactgtgcgagagatggctatggttcggacccggtgctatggggccagggcaccctggtcaccgtctcctca

SEQ ID NO: 1534 - protein, 118 aa, synthetic construct
EVQLVESGAEVMNPGSSVRVSCRGSGGDFSTYAFSWVRQAPGQGLEWMGRIIPILGIANYAQKFQGRVTITADKSTSTAYMELSSLRSDDTAVYYCARDGYGSDPVLWGQGTLVTVSS

SEQ ID NO: 1535 - DNA, 333 bp, synthetic construct
  source 1..333: mol_type = other DNA
aattttatgctgactcagccccactctgtgtcggggtctccggggaagacggtaaccctcccctgcacccgcagcagtggcagcattgccagccactatgtccagtggtaccagcagcgcccgggcagtgcccccaccactgtgatctatgaggataacaagagaccctctggggtccctgatcggttctctggctccatcgacagctcctccaactctgcctccctcagcatctctggactgaagactgaggacgaggctgactactactgtcagtcttatgatagcagcaatcgttgggtgttcggcggagggaccaagctgaccgtccta

SEQ ID NO: 1536 - protein, 111 aa, synthetic construct
NFMLTQPHSVSGSPGKTVTLPCTRSSGSIASHYVQWYQQRPGSAPTTVIYEDNKRPSGVPDRFSGSIDSSSNSASLSISGLKTEDEADYYCQSYDSSNRWVFGGGTKLTVL

SEQ ID NO: 1537 - DNA, 354 bp, synthetic construct
  source 1..354: mol_type = other DNA
gaggtgcagctggtgcagtctggagctgaggtgaagaagcctggggcctcagtgaaggtctcctgcaaggcttctggttacacctttaccaactatggtatcagctgggtgcgacaggcccctggacaagggcttgagtggatgggatggatcagcgcttacaatggtaacacaaactatgcacagaaggtccagggcagagtcaccatgaccacagacacatccacgagcacaggctacatggagctgaggagcctgagatctgacgacacggccgtgtattactgtgcgagaggagattttcggaaaccctttgactactggggccagggaaccctggtcaccgtctcctca

SEQ ID NO: 1538 - protein, 118 aa, synthetic construct
EVQLVQSGAEVKKPGASVKVSCKASGYTFTNYGISWVRQAPGQGLEWMGWISAYNGNTNYAQKVQGRVTMTTDTSTSTGYMELRSLRSDDTAVYYCARGDFRKPFDYWGQGTLVTVSS

SEQ ID NO: 1539 - DNA, 345 bp, synthetic construct
  source 1..345: mol_type = other DNA
ctgcctgtgctgactcagccggcttccctctctgcatcccccggagcatcagccagtctcacctgcaccttacgcagtggcctcaatgttggttcctacaggatatactggtaccagcagaagccagggagtcgtccccagtatctcctgaactacaaatcagactcaaataaacagcaggcctctggagtccccagccgcttctctggatccaaggatgcttcggccaatgcagggattttactcatctccgggctccagtctgaggatgaggctgactattactgtatgatttggtacagcagcgctgtggtattcggcggagggaccaagctgaccgtccta

SEQ ID NO: 1540 - protein, 115 aa, synthetic construct
LPVLTQPASLSASPGASASLTCTLRSGLNVGSYRIYWYQQKPGSRPQYLLNYKSDSNKQQASGVPSRFSGSKDASANAGILLISGLQSEDEADYYCMIWYSSAVVFGGGTKLTVL

SEQ ID NO: 1541 - protein, 5 aa, synthetic construct
SYAIS

SEQ ID NO: 1542 - protein, 5 aa, synthetic construct
SYGIS

SEQ ID NO: 1543 - protein, 5 aa, synthetic construct
SYALS

SEQ ID NO: 1544 - protein, 5 aa, synthetic construct
DYAMH

SEQ ID NO: 1545 - protein, 5 aa, synthetic construct
NYDMS

SEQ ID NO: 1546 - protein, 5 aa, synthetic construct
GLYIH

SEQ ID NO: 1547 - protein, 5 aa, synthetic construct
DNAIS

SEQ ID NO: 1548 - protein, 5 aa, synthetic construct
SYAMS

SEQ ID NO: 1549 - protein, 5 aa, synthetic construct
TYALN

SEQ ID NO: 1550 - protein, 5 aa, synthetic construct
SHGIT

SEQ ID NO: 1551 - protein, 5 aa, synthetic construct
RHGMH

SEQ ID NO: 1552 - protein, 5 aa, synthetic construct
TYAFS

SEQ ID NO: 1553 - protein, 5 aa, synthetic construct
NYGIS

SEQ ID NO: 1554 - protein, 17 aa, synthetic construct
WISPIGGSTNYAQKVQG

SEQ ID NO: 1555 - protein, 17 aa, synthetic construct
WISAYNGNTNYAQKLED

SEQ ID NO: 1556 - protein, 17 aa, synthetic construct
AISGGGGSTYYADSVKD

SEQ ID NO: 1557 - protein, 17 aa, synthetic construct
  source 1..17: note = Synthetic Heavy chain CDR2 of Ab-22
LISGDGGSTYYADSVKD

SEQ ID NO: 1558 - protein, 17 aa, synthetic construct
  source 1..17: note = Synthetic Heavy chain CDR2 of Ab-30
RVNWNGGSTTYADAVKD

SEQ ID NO: 1559 - protein, 17 aa, synthetic construct
  source 1..17: note = Synthetic Heavy chain CDR2 of Ab-31
WIIPIFGTANYAQKFED

SEQ ID NO: 1560 - protein, 17 aa, synthetic construct
  source 1..17: note = Synthetic Heavy chain CDR2 of Ab-32
WIIPIFGKPNYAQKFED

SEQ ID NO: 1561 - protein, 17 aa, synthetic construct
  source 1..17: note = Synthetic Heavy chain CDR2 of Ab-38
AISGSGGSTYYADSVKD

SEQ ID NO: 1562 - protein, 17 aa, synthetic construct
  source 1..17: note = Synthetic Heavy chain CDR2 of Ab-42
WIIPIFGTANYAQKFED

SEQ ID NO: 1563 - protein, 17 aa, synthetic construct
  source 1..17: note = Synthetic Heavy chain CDR2 of Ab-46
RIVPLIGLVNYAHNFED

SEQ ID NO: 1564 - protein, 17 aa, synthetic construct
  source 1..17: note = Synthetic Heavy chain CDR2 of Ab-50
WISAHNGHASNAQKVED

SEQ ID NO: 1565 - protein, 17 aa, synthetic construct
  source 1..17: note = Synthetic Heavy chain CDR2 of Ab-52
VISHDGSVKYYADSMKD

SEQ ID NO: 1566 - protein, 17 aa, synthetic construct
  source 1..17: note = Synthetic Heavy chain CDR2 of Ab-55
WTSPHNGLTAFAQILED

SEQ ID NO: 1567 - protein, 17 aa, synthetic construct
  source 1..17: note = Synthetic Heavy chain CDR2 of Ab-56
RIIPILGIANYAQKFED

SEQ ID NO: 1568 - protein, 17 aa, synthetic construct
  source 1..17: note = Synthetic Heavy chain CDR2 of Ab-65
WISAYNGNTNYAQKVED

SEQ ID NO: 1569 - protein, 19 aa, synthetic construct
  source 1..19: note = Synthetic Heavy chain CDR3 consensus
  VARIANT 3..17: note = Any naturally occurring amino acid
GLXXXXXXXXXXXXXXXDV

SEQ ID NO: 1570 - protein, 15 aa, synthetic construct
  source 1..15: note = Synthetic Heavy chain CDR3 of Ab-14
ALPSGTILVGGWFDP

SEQ ID NO: 1571 - protein, 15 aa, synthetic construct
  source 1..15: note = Synthetic Heavy chain CDR3 of Ab-16
DVFPETFSMNYGMDV

SEQ ID NO: 1572 - protein, 19 aa, synthetic construct
  source 1..19: note = Synthetic Heavy chain CDR3 of Ab-22
VLLPCSSTSCYGSVGAFDI

SEQ ID NO: 1573 - protein, 8 aa, synthetic construct
  source 1..8: note = Synthetic Heavy chain CDR3 of Ab-30
EFVGAYDL

SEQ ID NO: 1574 - protein, 12 aa, synthetic construct
  source 1..12: note = Synthetic Heavy chain CDR3 of Ab-31
GLRWGIWGWFDP

SEQ ID NO: 1575 - protein, 12 aa, synthetic construct
  source 1..12: note = Synthetic Heavy chain CDR3 of Ab-32
TMVRGFLGVMDV

SEQ ID NO: 1576 - protein, 16 aa, synthetic construct
  source 1..16: note = Synthetic Heavy chain CDR3 of Ab-38
DQFVTIFGVPRYGMDV

SEQ ID NO: 1577 - protein, 11 aa, synthetic construct
  source 1..11: note = Synthetic Heavy chain CDR3 of Ab-42
GRQMFGAGIDF

SEQ ID NO: 1578 - protein, 9 aa, synthetic construct
  source 1..9: note = Synthetic Heavy chain CDR3 of Ab-46
EVYGGNSDY

SEQ ID NO: 1579 - protein, 11 aa, synthetic construct
  source 1..11: note = Synthetic Heavy chain CDR3 of Ab-50
VHAALYYGMDV

SEQ ID NO: 1580 - protein, 12 aa, synthetic construct
  source 1..12: note = Synthetic Heavy chain CDR3 of Ab-52
GLSYQVSGWFDP

SEQ ID NO: 1581 - protein, 11 aa, synthetic construct
  source 1..11: note = Synthetic Heavy chain CDR3 of Ab-55
VHPVFSYALDV

SEQ ID NO: 1582 - protein, 9 aa, synthetic construct
  source 1..9: note = Synthetic Heavy chain CDR3 of Ab-56
DGYGSDPVL

SEQ ID NO: 1583 - protein, 9 aa, synthetic construct
  source 1..9: note = Synthetic Heavy chain CDR3 of Ab-65
GDFRKPFDY

SEQ ID NO: 1584 - protein, 13 aa, synthetic construct
  source 1..13: note = Synthetic Light chain CDR1 consensus
TRSSGSIGSNYVQ

SEQ ID NO: 1585 - protein, 13 aa, synthetic construct
  source 1..13: note = Synthetic Light chain CDR1 of Ab-14
TRSSGNIASNYVQ

SEQ ID NO: 1586 - protein, 11 aa, synthetic construct
  source 1..11: note = Synthetic Light chain CDR1 of Ab-16
QGDSLRSYYAS

SEQ ID NO: 1587 - protein, 11 aa, synthetic construct
  source 1..11: note = Synthetic Light chain CDR1 of Ab-22
GGSDIGRKSVH

SEQ ID NO: 1588 - protein, 14 aa, synthetic construct
  source 1..14: note = Synthetic Light chain CDR1 of Ab-30
TGTSSDVGGYNYVS

SEQ ID NO: 1589 - protein, 11 aa, synthetic construct
  source 1..11: note = Synthetic Light chain CDR1 of Ab-31
RASQSIGNSLA

SEQ ID NO: 1590 - protein, 11 aa, synthetic construct
  source 1..11: note = Synthetic Light chain CDR1 of Ab-32
RASQGIGSYLA

SEQ ID NO: 1591 - protein, 11 aa, synthetic construct
  source 1..11: note = Synthetic Light chain CDR1 of Ab-38
SGDKLGNKYAY

SEQ ID NO: 1592 - protein, 13 aa, synthetic construct
  source 1..13: note = Synthetic Light chain CDR1 of Ab-42
TRSSGSIDSNYVQ

SEQ ID NO: 1593 - protein, 13 aa, synthetic construct
  source 1..13: note = Synthetic Light chain CDR1 of Ab-46
TRSSGNIGTNYVQ

SEQ ID NO: 1594 - protein, 11 aa, synthetic construct
  source 1..11: note = Synthetic Light chain CDR1 of Ab-50
GGNNIGSKGVH

SEQ ID NO: 1595 - protein, 13 aa, synthetic construct
  source 1..13: note = Synthetic Light chain CDR1 of Ab-52
TRSSGSIASNYVQ

SEQ ID NO: 1596 - protein, 13 aa, synthetic construct
  source 1..13: note = Synthetic Light chain CDR1 of Ab-55
TRSSGSIASNYVQ

SEQ ID NO: 1597 - protein, 13 aa, synthetic construct
  source 1..13: note = Synthetic Light chain CDR1 of Ab-56
TRSSGSIASHYVQ

SEQ ID NO: 1598 - protein, 14 aa, synthetic construct
  source 1..14: note = Synthetic Light chain CDR1 of Ab-65
TLRSGLNVGSYRIY

SEQ ID NO: 1599 - protein, 7 aa, synthetic construct
  source 1..7: note = Synthetic Light chain CDR2 of consensus, Ab-14, Ab-42, Ab-52, Ab-55
EDNQRPS

SEQ ID NO: 1600 - protein, 7 aa, synthetic construct
  source 1..7: note = Synthetic Light chain CDR2 of Ab-16
GKNNRPS

SEQ ID NO: 1601 - protein, 7 aa, synthetic construct
  source 1..7: note = Synthetic Light chain CDR2 of Ab-22
SDRDRPS

SEQ ID NO: 1602 - protein, 7 aa, synthetic construct
  source 1..7: note = Synthetic Light chain CDR2 of Ab-30
DVSNRPS

SEQ ID NO: 1603 - protein, 7 aa, synthetic construct
  source 1..7: note = Synthetic Light chain CDR2 of Ab-31
GASSRAT

SEQ ID NO: 1604 - protein, 7 aa, synthetic construct
  source 1..7: note = Synthetic Light chain CDR2 of Ab-32
AASTLQS

SEQ ID NO: 1605 - protein, 7 aa, synthetic construct
  source 1..7: note = Synthetic Light chain CDR2 of Ab-38
QDIKRPS

SEQ ID NO: 1606 - protein, 7 aa, synthetic construct
  source 1..7: note = Synthetic Light chain CDR2 of Ab-46
EDYRRPS

SEQ ID NO: 1607 - protein, 7 aa, synthetic construct
  source 1..7: note = Synthetic Light chain CDR2 of Ab-50
DDSDRPS

SEQ ID NO: 1608 - protein, 7 aa, synthetic construct
  source 1..7: note = Synthetic Light chain CDR2 of Ab-56
EDNKRPS

SEQ ID NO: 1609 - protein, 11 aa, synthetic construct
  source 1..11: note = Synthetic Light chain CDR2 of Ab-65
YKSDSNKQQAS

SEQ ID NO: 1610 - protein, 9 aa, synthetic construct
  source 1..9: note = Synthetic Light chain CDR3 consensus
QSYDSSTWV

SEQ ID NO: 1611 - protein, 10 aa, synthetic construct
  source 1..10: note = Synthetic Light chain CDR3 of Ab-14
QSYDSSNLWV

SEQ ID NO: 1612 - protein, 11 aa, synthetic construct
  source 1..11: note = Synthetic Light chain CDR3 of Ab-16
NSRDSSGNHYV

SEQ ID NO: 1613 - protein, 11 aa, synthetic construct
  source 1..11: note = Synthetic Light chain CDR3 of Ab-22
QVWDNNSDHYV

SEQ ID NO: 1614 - protein, 9 aa, synthetic construct
  source 1..9: note = Synthetic Light chain CDR3 of Ab-30
SSYTSSTLP

SEQ ID NO: 1615 - protein, 9 aa, synthetic construct
  source 1..9: note = Synthetic Light chain CDR3 of Ab-31
QQHTIPTFS

SEQ ID NO: 1616 - protein, 9 aa, synthetic construct
  source 1..9: note = Synthetic Light chain CDR3 of Ab-32
QQLNNYPIT

SEQ ID NO: 1617 - protein, 8 aa, synthetic construct
  source 1..8: note = Synthetic Light chain CDR3 of Ab-38
QTWDNSVV

SEQ ID NO: 1618 - protein, 11 aa, synthetic construct
  source 1..11: note = Synthetic Light chain CDR3 of Ab-42
QSYDSNNRHVI

SEQ ID NO: 1619 - protein, 9 aa, synthetic construct
  source 1..9: note = Synthetic Light chain CDR3 of Ab-46
QSYHSSGWE

SEQ ID NO: 1620 - protein, 11 aa, synthetic construct
  source 1..11: note = Synthetic Light chain CDR3 of Ab-50
QVWDSSSDHWV

SEQ ID NO: 1621 - protein, 10 aa, synthetic construct
  source 1..10: note = Synthetic Light chain CDR3 of Ab-52
QSYDSTTPSV

SEQ ID NO: 1622 - protein, 9 aa, synthetic construct
  source 1..9: note = Synthetic Light chain CDR3 of Ab-55
QSYDGITVI

SEQ ID NO: 1623 - protein, 10 aa, synthetic construct
  source 1..10: note = Synthetic Light chain CDR3 of Ab-56
QSYDSSNRWV

SEQ ID NO: 1624 - protein, 9 aa, synthetic construct
  source 1..9: note = Synthetic Light chain CDR3 of Ab-65
MIWYSSAVV

SEQ ID NO: 1625 - DNA, 717 bp, Homo sapiens
  source 1..717: mol_type = unassigned DNA
gaggtgcagctggtgcagtctgggggaggcgtggtccagcctgggaagtccctgagactctcctgtgcagcctctggattcgccttcagtagttatgctatgcactgggtccgccaggctccaggcaaggggctggagtgggtggcagttatatcatatgatggaagtaataaatactacgcagactccgtgaagggccgattcaccatctccagagacaattccaagaacacgctgtatctgcaaatgaacagcctgagagctgaggacacggctgtgtattactgtgcgagggacaggagctactaccttgactactggggccagggaaccctggtcaccgtctcctcaggtggcggcggttccggaggtggtggttctggcggtggtggcagcgaaacgacactcacgcagtctccagccaccctgtctttgtctccaggggaaagggccaccctctcctgcagggccagtcagagtgttaggagcaacttagcctggtaccagcagaaacctggccaggctcccaggcccctcatctatgatgcatccaccagggccactggcatcccagacaggttcagtggcagtgggtctgggacagacttcactctcaccatcagcagactggagcctgaagattttgcagtttattactgtcagcagcgtagcaactggcctccgacgttcggccaagggaccaaggtggaagtcaaa

SEQ ID NO: 1626 - DNA, 351 bp, Homo sapiens
  source 1..351: mol_type = unassigned DNA
gaggtgcagctggtgcagtctgggggaggcgtggtccagcctgggaagtccctgagactctcctgtgcagcctctggattcgccttcagtagttatgctatgcactgggtccgccaggctccaggcaaggggctggagtgggtggcagttatatcatatgatggaagtaataaatactacgcagactccgtgaagggccgattcaccatctccagagacaattccaagaacacgctgtatctgcaaatgaacagcctgagagctgaggacacggctgtgtattactgtgcgagggacaggagctactaccttgactactggggccagggaaccctggtcaccgtctcctca

SEQ ID NO: 1627 - DNA, 987 bp, Homo sapiens
  source 1..987: mol_type = unassigned DNA
gctagcaccaagggcccatcggtcttccccctggcaccctcctccaagagcacctctgggggcacagcggccctgggctgcctggtcaaggactacttccccgaaccggtgacggtgtcgtggaactcaggcgccctgaccagcggcgtgcacaccttcccggctgtcctacagtcctcaggactctactccctcagcagcgtggtgaccgtgccctccagcagcttgggcacccagacctacatctgcaacgtgaatcacaagcccagcaccaaggtggacaagaaagcagagcccaaatcttgtgacaaaactcacacatccccaccgtgcccagcacctgaactcctggggggaccgtcagtcttcctcttccccccaaaacccaaggacaccctcaggatctcccggacccctgaggtcacatgcgtggtggtggacgtgagccacgaagaccctgaggtcaagttcaactggtacgtggacggcgtggaggtgcataatgccaagacaaagccgcgggaggagcagtacagcacgtaccgggtggtcagcgtcctcaccgtcctgcaccaggactggctgaatggcaaggagtacaagtgcaaggtctccaacaaagccctcccagcccccatcgagaaaaccatctccaaagccaaagggcagccccgagaaccacaggtgtacaccctgcccccatcccgggatgagctgaccaagaaccaggtcagcctgacctgcctggtcaaaggcttctatcccagcgacatcgccgtggagtgggagagcaatgggcagccggagaacaactacaagaccacgcctcccgtgctggactccgacggctccttcttcctctacagcaagctcaccgtggacaagagcaggtggcagcaggggaacgtcttctcatgctccgtgatgcatgaggctctgcacaaccactacacgcagaagagcctctccctgtctccgggtaaatga

SEQ ID NO: 1628 - DNA, 318 bp, Homo sapiens
  source 1..318: mol_type = unassigned DNA
acgacactcacgcagtctccagccaccctgtctttgtctccaggggaaagggccaccctctcctgcagggccagtcagagtgttaggagcaacttagcctggtaccagcagaaacctggccaggctcccaggcccctcatctatgatgcatccaccagggccactggcatcccagacaggttcagtggcagtgggtctgggacagacttcactctcaccatcagcagactggagcctgaagattttgcagtttattactgtcagcagcgtagcaactggcctccgacgttcggccaagggaccaaggtggaagtcaaa

SEQ ID NO: 1629 - DNA, 348 bp, Homo sapiens
  source 1..348: mol_type = unassigned DNA
gatggtaccaaggtggaaatcaaacgtacggtggctgcaccatctgtcttcatcttcccgccatctgatgagcagttgaaatctggaactgcctctgttgtgtgcctgctgaataacttctatcccagagaggccaaagtacagtggaaggtggataacgccctccaatcgggtaactcccaggagagtgtcacagagcaggacagcaaggacagcacctacagcctcagcagcaccctgacgctgagcaaagcagactacgagaaacacaaagtctacgcctgcgaagtcacccatcagggcctgagctcgcccgtcacaaagagcttcaacaggggagagtgttga

SEQ ID NO: 1630 - protein, 102 aa, Homo sapiens
QVQLVQSGGGVPGSLRLSCAASGFTFSSYMSWVRQAPGKGLEWVISGSYYADSVKGRFTISRDNSKNTLYLQMNSLRAEDTAVYYCARDDYWGQGTLVTVSS

SEQ ID NO: 1631 - protein, 116 aa, Homo sapiens
QVQLVQSGGGVVQPGRSLRLSCAASGFTVSSNYMSWVRQAPGKGLEWVSVIYSGGSTYYADSVKGRFTISRDNSKNTLYLQMNSLRAEDTAVYYCAKDYGEGFDYWGQGTLVTVSS

SEQ ID NO: 1632 - protein, 117 aa, Homo sapiens
EVQLVQSGGGLVKPGGSLRLSCAASGFTFSDYYMSWIRQAPGKGLEWVSYISSSGSTIYYADSVKGRFTISRDNAKNSLYLQMNSLRAEDTGVYYCARDWGYSFGDWGQGTLVTVSS

SEQ ID NO: 1633 - protein, 127 aa, Homo sapiens
QVQLVQSGAEVKKPGASVKVSCKASGYTFTTYGISWVRQAPGQGLEWMGWISAYNGNTNYAQKLQGRVTMTTDTSTSTAYMELRSLRSDDTAVYYCARVGYYGDYAWGYYYYGMDVWGQGTLVTVSS

SEQ ID NO: 1634 - protein, 122 aa, Homo sapiens
QVQLQESGGGLVKPGGSLRLSCAASGFTFSDYYMSWIRQAPGKGLEWVSYISSSGSTIYYADSVKGRFTISRDNAKNSLYLQMNSLRAEDTAVYYCARERWLQIGEDAFDIWGQGTTVTVSS

SEQ ID NO: 1635 - protein, 116 aa, Homo sapiens
QVQLVQSGGGLIQPGGSLRLSCAASGFTVSSNYMSWVRQAPGKGLEWVSVIYSGGSTYYADSVKGRFTISRDNSKNTLYLQMNSLRAEDTAVYYCARNFGEDFDYWGQGTLVTVSS

SEQ ID NO: 1636 - protein, 117 aa, Homo sapiens
EVQLVQSGGGVVQPGKSLRLSCAASGFAFSSYAMHWVRQAPGKGLEWVAVISYDGSNKYYADSVKGRFTISRDNSKNTLYLQMNSLRAEDTAVYYCARDRSYYLDYWGQGTLVTVSS

SEQ ID NO: 1637 - protein, 124 aa, Homo sapiens
QVQLVQSGGGLVQPGGSLRLSCAASGFTFSSSWMSWVRQAPGKGLEWVAYIKQDGSEKYYVDSVKGRFTISRDNAKNSLYLQMDSLRAEDTAVYYCARDQGWGWDGTEYYSDYWGQGTLVTVSS

SEQ ID NO: 1638 - protein, 123 aa, Homo sapiens
QVQLVQSGAEVKKPGASVKVSCKASGYTFTSYGISWVRQAPGQGLEWMGWISAYNGNTNYAQKLQGRVTMTTDTSTSTAYMELRSLRSDDTAVYYCARDDLSDYGEWLGPDYWGQGTLVTVSS

SEQ ID NO: 1639 - protein, 81 aa, Homo sapiens
QLTQPSSGSPGQRTISCGSSGNVSWYQQPGAPKLLIYRPSGVPDRFSGSKSGTASLTISGLQEDEADYYCVFGGTKLTVLG

SEQ ID NO: 1640 - protein, 106 aa, Homo sapiens
IQMTQSPSSLSASVGDRVTITCRATQSISTHLNWYQQRGGKAPKLLIYGASTLESGVPSRFSGSGSGTEFTLTISSLQPEDFATYYCLQHRSYPWTFGQGTNVEIK

SEQ ID NO: 1641 - protein, 112 aa, Homo sapiens
SYELTQPPSASGTPGQRVTISCSGSSSSIGSETVNWYQQLPGTAPKLLIYSNNQRPSGVPDRFSGSKSGTSASLAISGLQSEDEADYYCTAWDDTLNGRVIFGGGTKLTVLG

SEQ ID NO: 1642 - protein, 111 aa, Homo sapiens
QTVVTQEPSFSVSPGGTITLTCDLNSGLVSSSHYPSWYQQTPGQAPRTLIYNTNIRSSGVPDRFSGAILGNKAALTITGAQAEDESDYYCVLYMGSGISVFGGGTKLTVLG

SEQ ID NO: 1643 - protein, 111 aa, Homo sapiens
QSALTQPASVSGSPGQSITISCTGTSSDLGGHNFVSWYQQHPGKAPKLMIYDVFNRPSGVSSRFSGSKSGNTASLTISGLQAEDEADYFCSSYTITNIVVFGRGTKLTVLG

SEQ ID NO: 1644 - protein, 106 aa, Homo sapiens
TTLTQSPATLSLSPGERATLSCRASQSVRSNLAWYQQKPGQAPRPLIYDASTRATGIPDRFSGSGSGTDFTLTISRLEPEDFAVYYCQQRSNWPPTFGQGTKVEVK

SEQ ID NO: 1645 - protein, 111 aa, Homo sapiens
QSALTQPASVSGSPGQSITISCTGTSSDVGGYNYVSWYQQHPGKAPKLMIYDVSKRPSGVPDRFSGSKSGNTASLTISGLQAEDEADYFCSSYTITDIVVFGGGTKLTVLR

SEQ ID NO: 1646 - protein, 111 aa, Homo sapiens
QPGLTQPPSASGTPGQRVTISCSGSRSNIGGNTVNWYQHVPGTAPKLLIYSNNQRPSGVPDRFSGSKSGTSASLAISGLRSEDEAEYYCATWEDSLSGYVFGPGTKVTVLG

SEQ ID NO: 1647 - protein, 15 aa, Homo sapiens
RTMHPSDEFLPLGMP

SEQ ID NO: 1648 - protein, 15 aa, Homo sapiens
VVPLGRCVSHPAICA

SEQ ID NO: 1649 - protein, 15 aa, Homo sapiens
SVDDCRWNLNCEPPP

SEQ ID NO: 1650 - protein, 13 aa, Homo sapiens
CLSATCDCTLCGP

SEQ ID NO: 1651 - protein, 15 aa, Homo sapiens
GTGLVPLFDPRYRFL

SEQ ID NO: 1652 - protein, 15 aa, Homo sapiens
PNCWVGLTGAHSCFL

SEQ ID NO: 1653 - protein, 14 aa, Homo sapiens
YQADCLMNRCPTAE

SEQ ID NO: 1654 - protein, 669 aa, Homo sapiens
MFIFLLFLTLTSGSDLDRCTTFDDVQAPNYTQHTSSMRGVYYPDEIFRSDTLYLTQDLFLPFYSNVTGFHTINHTFGNPVIPFKDGIYFAATEKSNVVRGWVFGSTMNNKSQSVIIINNSTNVVIRACNFELCDNPFFAVSKPMGTQTHTMIFDNAFNCTFEYISDAFSLDVSEKSGNFKHLREFVFKNKDGFLYVYKGYQPIDVVRDLPSGFNTLKPIFKLPLGINITNFRAILTAFSPAQDIWGTSAAAYFVGYLKPTTFMLKYDENGTITDAVDCSQNPLAELKCSVKSFEIDKGIYQTSNFRVVPSGDVVRFPNITNLCPFGEVFNPSVYAWERKKISNCVADYSVLYNSTFFSTFKCYGVSATKLNDLCFSNVYADSFVVKGDDVRQIAPGQTGVIADYNYKLPDDFMGCVLAWNTRNIDATSTGNYNYKYRYLRHGKLRPFERDISNVPFSPDGKPCTPPALNCYWPLNDYGFYTTTGIGYQPYRVVVLSFELLNAPATVCGPKLSTDLIKNQCVNFNFNGLTGTGVLTPSSKRFQPFQQFGRDVSDFTDSVRDPKTSEILDISPCAFGGVSVITPGTNASSEVAVLYQDVNCTDVSTAIHADQLTPAWRIYSTGNNVFQTQAGCLIGAEHVDTSYECDIPIGAGICASYHTVSLLRSTSQKS

SEQ ID NO: 1655 - protein, 20 aa, Homo sapiens
RVVVLSFELGPPGGPFGEVF

SEQ ID NO: 1656 - protein, 14 aa, Homo sapiens
VVVSFELNLCPFGE

SEQ ID NO: 1657 - protein, 11 aa, Homo sapiens
  VARIANT 5..7: note = Any amino acid
SFELXXXPFGE

SEQ ID NO: 1658 - protein, 13 aa, Homo sapiens
  VARIANT 5..9: note = Any amino acid
SFELXXXXXPFGE

SEQ ID NO: 1659 - protein, 5 aa, Homo sapiens
VYDNK

SEQ ID NO: 1660 - protein, 5 aa, Homo sapiens
RSYYL

SEQ ID NO: 1661 - protein, 10 aa, Homo sapiens
RASQVRSNLA

SEQ ID NO: 1662 - protein, 6 aa, Homo sapiens
DASTAT

SEQ ID NO: 1663 - protein, 9 aa, Homo sapiens
QQRSNWPPT

SEQ ID NO: 1664 - protein, 13 aa, Homo sapiens
CLSATCDCTLCGP

SEQ ID NO: 1665 - DNA, 390 bp, synthetic construct; identical to SEQ ID NO: 1471
  source 1..390: mol_type = other DNA

SEQ ID NO: 1666 - protein, 130 aa, synthetic construct; identical to SEQ ID NO: 1472

SEQ ID NO: 1667 - DNA, 330 bp, synthetic construct
  source 1..330: mol_type = other DNA
aattttatgctgactcagccaccctcagcgtctgggacccccgggcagagggtcaccatctcttgctctggaagcagctccaacatcggaggtaatactgtacactggttccagcagctcccaggaacggcccccaaactcctcatctatactaatagtctgcggccctcaggggtccctgaccgattctctggctccaagtctggcacctcagcctccctggccatcagtgggctccagtctgaggatgaggctgattattactgtgcagcatgggatgacagcctaaatggtcaggtgttcggcggagggaccaagctgaccgtccta

SEQ ID NO: 1668 - protein, 110 aa, synthetic construct; identical to SEQ ID NO: 1473

SEQ ID NO: 1669 - DNA, 330 bp, synthetic construct; identical to SEQ ID NO: 1474
  source 1..330: mol_type = other DNA

SEQ ID NO: 1670 - protein, 110 aa, synthetic construct; identical to SEQ ID NO: 1475

SEQ ID NO: 1671 - protein, 8 aa, synthetic construct
GFTFSNYG

SEQ ID NO: 1672 - protein, 8 aa, synthetic construct
ISFDGSKK

SEQ ID NO: 1673 - protein, 25 aa, synthetic construct
CAKLPSPYYFDSRFVWVAASAFHFW

SEQ ID NO: 1674 - protein, 8 aa, synthetic construct
SSNIGGNT

SEQ ID NO: 1675 - skipped

SEQ ID NO: 1676 - protein, 13 aa, synthetic construct [sequence omitted]

SEQ ID NO: 1677 - protein, 13 aa, synthetic construct
CAAWDNSLNGQVF

SEQ ID NO: 1678 - protein, 9 aa, synthetic construct
TETSQVAPA

SEQ ID NO: 1679 - DNA, 28 bp, synthetic construct
  source 1..28: mol_type = other DNA
tcgacgcgtgaggtgcagctggtgcagt

SEQ ID NO: 1680 - DNA, 29 bp, synthetic construct
  source 1..29: mol_type = other DNA
tcctctagacaggacggtgaccttggtcc

SEQ ID NO: 1681 - DNA, 81 bp, synthetic construct
  source 1..81: mol_type = other DNA
tagggcgcggccgcaaccgagaccagccaggtggcgcccgccgggggaggaggcagccccaccacgacgccagcgccgcga

SEQ ID NO: 1682 - DNA, 81 bp, synthetic construct
  source 1..81: mol_type = other DNA
tagggcgcggccgcaaccgagaccagccaggtggcgcccgccggcggaggaggcagcattgaagttatgtatcctcctcct

SEQ ID NO: 1683 - DNA, 41 bp, synthetic construct
  source 1..41: mol_type = other DNA
ctagccttaattaattagcgaggagggggcagggcctgcat

SEQ ID NO: 1684 - protein, 5 aa, synthetic construct
GGGGS

SEQ ID NO: 1685 - protein, 14 aa, synthetic construct
TETSQVQPQGGGGS

SEQ ID NO: 1686 - protein, 9 aa, synthetic construct
TETSQVQPQ

1.-21. (canceled)

22. A method for treating cancer, the method comprising administering to a subject a genetically engineered cell which expresses and bears on the cell surface membrane a chimeric antigen receptor (CAR) comprising an extracellular domain, a transmembrane domain and an intracellular signaling domain, wherein the CAR is specific for CAIX, wherein the cell is further engineered to express and secrete a polypeptide, wherein the polypeptide is an anti-PD-L1 scFv-Fc antibody, and wherein the Fc of the scFv-Fc antibody is derived from IgG1 or IgG4.

23. The method of claim 22, wherein the transmembrane domain further comprises a stalk region positioned between the extracellular domain and the transmembrane domain or wherein the transmembrane domain comprises CD28.

24. The method of claim 22, further comprising one or more additional costimulatory molecules positioned between the transmembrane domain and the intracellular signaling domain.

25. The method of claim 24, wherein the costimulatory molecule is CD28, 4-1BB, ICOS, or OX40 costimulatory molecule.

26. The method of claim 22, wherein the intracellular signaling domain comprises a CD3 zeta chain intracellular signaling domain.

27. The method of claim 22, wherein the extracellular domain is a Fab antibody or a scFv antibody.

28. The method of claim 22, wherein the cell is a T cell or an NK cell.

29. The method of claim 28, wherein the T cell is CD4⁺, CD8⁺, or a mixed population of CD4⁺ and CD8⁺ cells.

30. The method of claim 22, wherein the extracellular domain is a scFv antibody specific for CAIX.

31. The method of claim 22, wherein the cancer is renal cell carcinoma.

32. A method for preventing T cell exhaustion, the method comprising administering to a subject a genetically engineered cell which expresses and bears on the cell surface membrane a chimeric antigen receptor (CAR) comprising an extracellular domain, a transmembrane domain and an intracellular signaling domain, wherein the CAR is specific for CAIX, wherein the cell is further engineered to express and secrete a polypeptide, wherein the polypeptide is an anti-PD-L1 scFv-Fc antibody, and wherein the Fc of the scFv-Fc antibody is derived from IgG1 or IgG4.

33. A method for recruiting NK cells to a tumor, the method comprising administering to a subject a genetically engineered cell which expresses and bears on the cell surface membrane a chimeric antigen receptor (CAR) comprising an extracellular domain, a transmembrane domain and an intracellular signaling domain, wherein the CAR is specific for CAIX, wherein the cell is further engineered to express and secrete a polypeptide, wherein the polypeptide is an anti-PD-L1 scFv-Fc antibody, and wherein the Fc of the scFv-Fc antibody is derived from IgG1 or IgG4.
